United States Patent Application Publication US 2019/0259469 A1 - sequence listing, part 2

SEQ ID NO: 2 - DNA, 4857450 bp, Salmonella typhimurium (residues 1,619,151-3,238,300 of 4,857,450)
cggacaccgcgccgccgagcggggaaccggcgctaaaaattccgatcgccgtggcagactcctttcgggaaatccagttattgatgattttatttccggcagcgctgaccggcccttcagccataccgaaaagaacgcgcacgataagcattgtccacaatccggtgactaaaccagttaagccacaaaatacagaccatagtaacgctgcgatgagaaaaaccgtttttggcccaactttatcgctggcccagccaccaataaaattaaacagggcgtatccgataaaaaacgcgctgaagatcatccccatctccgcggcgttaaatcctaactccttttcgatcaagggggcagttatcgacaatgctgaacgatccatatagttgagcatgtaaactataaatagaagaaaaacgataagccatcccattgtttttcttttcatgattaatcctcttattgtggtctagcggcctgaccacaatattttaaggttattttcaaatcacctctcttgtggttagaacgtgatcaatataacaaaaatttatcacaggggatttttatccatcgcaagtgtgatggattaaattctttaaaatcagttgattaattgaaaattcaatcggagctatcgttttcccctaatccacgccccggtaaagtttgacatgcggcgttaacggaaggtggcgctgtctgtgggtatttttcatcgggcgtaatataaacctgactcgtggcgacatagccatcattaaaagttgcttcgatataggtagcttcccaacctgtcttcggttcatttagcgtaatactgatcttattgttgacgggactatctattgtaagcggctgatagcggataccacaggcataacgaaaatcacgcgcatttggattgttggctgtccagcgaacgacttttaccggcgcttctgagaaatagaccgtaagaaggtggtggtgaataaggtcgatcaactgtggtaatgtttttttactttgaaaccggttaataaatggaacgaggcttccttcagcgaactggttaattgagtagtggttcatattaggcactatacgtaatgattttacgccaggaagtttgctataataaaagcgagtgttgtctggtacgaaaaaatcatcgccacttgcattaataatatatttaggtattgcaaggcggggttggtaaatagtgttgagatatcttaacggatctattatttgccttagctgggtaaatgcgggggattttattttctcatctatgccttgctggtagtaggggtagaatgtaatgggccaatttccaccgtatgattgataaatatgctcaagtgaagcatcaatatcaagtagatcaatggcgaagggaacaattgcttcaacatcaggatcggcaatagctgacaaccaggtggtccacccacgctttgaaatacctgtaatgataaaggaatttatattccattgcgttaactccttttttgctaatctcatcgcttgcgatatggcagtgaccataggaatatttaaaggcattaacttacgttgctccggcgcttccataaataatgcccagcttcgggaaacgctttcgtcctctttcagtggttttttatcatcctgaaaggttaaatattggttaggtatatcactcactgatattacgatggtattcgtatcacgggagatgcttgccagtgtttcctgggggaaatcaccgggtttaccagtgatttgtacgcctttatcataattaattccgttgtttacaaccaccaaagcatggtgctcttttgccgtttcagggatataaatatcaacgttatgtcgccattgcgcaggggttaccatgtcatctggcgaccagtgttgcgataataattcatagtgtctgactaccacctgtgctaatggagctgtattaatcaaggtatattttagcggtgtgcctgaaatctgctcccggtagtcggggagaacatgagacaaatcacactccgggctgtttcgacaaaagaagatgttgttatgaagtagtgtataaacttttgtagaaatgaaaaacagtacgataacaacgagatatatttttttcatgctttccccgcgctttacaagggcaaatgccagccagcataatttccataaatacctcttaaacattcaatataagtacaatacttttgataaataacggaagaagggaacaataatgtttgtgacgttgtcacattattctgtttctggtttcactattagcactgaactttttgaaaggtaaatcattgccgtcaccagaccaataatggcgacagagatagctataccgatccagacgccatacagagcataacccaggacaaatccgcccaatacgggggatataaaatcagcgattgcgattaatgcctgcgccgttccgatgacgataccttgtcgggcaggcgatacatggacggacaaggcggcaagataagtgggtttggctagcgcatcagcgatgctaatacaaacgatagcaaaaacaagcacaggtatggtcgtggcgatacccgcagtgagaaatccagtacaaagaagggcgaagatgaggataattagctttcgctccgaaaaatattggctcacccaacctaacagaaatagctgaacgaaaatattaataaccccgtccgccattaacagatagcttaacgcttttggcccaaagggaagcccattccagatgaaggtgtcagaaagaaaaacaggtaattgtgaagagtacatgccataggcgaagaaatgacaaagcattacgatgattaagacgcgaaggacaggcatctttaaaatagcgcgggcagagaacgccgctattttatctgtggtacgtgatgttgtggaagggtcttttaacccccaaatcgcgaccagggcagacccaaggacaagtataaaggcggcgtagatcggcgcgctcagactgatacgcgataaccacccggaaacgcctgccccgacaataccgcctaaaccaatgcagcctgtgaggataccgattgcctgacgccgatttctgacgtgcgtacaatcggcaatataggctgcggcggctgacaaattcccggcgctaatgccaaaaagcgtgcgggcgagcaggataaacaggatacattgcgcgttggcgagtaatagtaaacttatcgccgcaatagccagcgtgacaatcagtattcgcttgcggccaacgcgatcggaaaggtggccaatcaggggcgccgcacaaaattggctaaaagcttcagtggcgatgatgattccaatgataagcggcgaaccgcccatctcgcggatataaaaaggcagtaccgacattacagccgcggtactggcggcgtaaaggccgacaagcaggaaaacaggcaaaatacgccgcttgttgagcggggtgatagtttcgctgtcggtgttctcatagacattagtattcatctttaatccctatggcaaaacgagagagataattttcaatatcgttgctctgtttgccgtgaaagaatgcgccgacatagccatcgggtcggatcagcacgcattgacccggcgccagatgataggattcccggaagtgccccagggtatcgatgagctcgtcctgctcgccaatgtgatgaatacgcagtcctcgccgcgcatcgatgaccttaccatgggtttcgtaggccaacagattccagtccggaccttgtagtaactgaaataatcgtaatgattggccgccggcgcccaaaagaggagcatccggagctctttctcccgcttgtaacccatgctgacgttcgggtaacgtgtgggctaagggggagttggtatactggatgtcaagttgttgaacatcgcgttctcgtttgatgcctctctgtttttgagagtcaagtaatcgggtagaaaggtggagcagtgattcggctatcgggcggcgttcctgttcatagctatcgagaagttcttctcctgcgccccgcagcgaggctgccattttccatcccaggttataggcatcctggatgctggtatttaacccttgcccacccgtcggcggatgcacatgagcggcatcaccggctaaaaataccttacccacacggtaatgttccgctatgcgcgcattcatctggtacttcgatacccagggaatcgaatggatgcgaacatccgtccgcccgattcgttcagtaagaaaagccgtgagcacgtcggctgagaaattctgcgagtcgtccggggccaacaacgcctggatttgaaagagctgcgtgccggcgagagggcaaatcgttatcatccgcgccatatcgccatcgttaaaatggtgccatacatcccggttcagaccggaaagtgaagcgtcagccacaagcgcatggattcccaacgtacgaccggggaagctgacgcctaatttttttctgacaaagcttccgccgccatccgcacctatcaaataatgcgcgatgatgacctcttctccagccggcccggcaacatacgcggtgactgtgcgtggggtttgcgcaaaatgtcgtaactcgcagccgaactccacccgatgtccccatgcttttaattgctctcgcataatcgtttctgtcacgttctgtggaaccatcaatggcagatggtagggttcggcgtgggtcggttttgtatgatgcgcaatatctgaatctacatagcttccgtcgtgacggtaggttcgtagtcggggatagagcccgccggcggcgaccactttattgagtattccaagatcctcgaagatttcttgcgttcgcggctgaatacctttaccgcgggagccgataaaaggcgtcgttcttttctcaatcaggcgaaatgagaccccgtgacgcgccagttcgatggctaaagtaagcccggtaacgccagcgccgcagatcagtacatctgtagtggtgtatcttgtcatcgtctctccgatatgtgtattatgcacataagaggagacatgctatgtcagaaaataaaaatgtgcaagatacacatatttccgagcaaatgaaggcgcttcacggtgcgttgattcgcgtggtgagcgcgcttaaccggcctcgtaatgatgagaaattaattgcagaggcggggatacaactcgatcgtgcgctattttcgatccttattagtatcgaacgtttagggccgattggcgttgttgagttagccgaacgtgccggtcgtgattatacgacggtaagccgacaggtcgccaaactggagaagctggggttgataatacggcagcataatgccatcgatcgtcgtatacgcgaggccgttatctcccgtacaggaaaggcgatgacggagcgtatagacgctgcgcgagagcaaatgggcaacgttgtttttaaagactggcctcaggatgaacttgatgtctttgttcggctaatgcaaaagtttgccgatgcaatggatagcgatgcttcaatgccggaataagcaaaagaaaagggcggtcaaatccgatcgtccaggctaatatcggtatctgacattgattaaatagccagcaaagtaaatataacaacaacatttatcgagttaattttcaccctttgaaaggccaacgtatactgcagaatacggctatataacaatcgccgtatcaatggtttttcaaagggtaaatatatgcttaccgaaaaatatgattttcgcattaccgatcagatgactatcccactcagacctcattggatagccaatgattcatacagggaaaagtgtaaaatgcttgtcctcaaccggagtaaaggggaaattcataaggtagactttagtaaattaacagattatatcaaagaaggtgatgtaatctgttttaacgacagtactataataaaccatatgtttatctgtaaaacaagacagaataggttaattaaaattgttttagagggatttttaccaaataatagagtaattatttccggacttttaaaagaaaggcttaacgcgaatgatgttttctatttggttgataaccctgaaatttccattaagatagagcaaaggtttagcgaggagagccagtaccgggccgtcgtggaaaatcatgaggccttaatttgctatttagccagtcatggtgagcgtcttgatgagtatgtggactccagcttgttttataaatatccagatgcttaccgttccgttttttctaaaaaatatggttctttggaaataccttctgccggcattcattttacctgggatcttatccaaagaatcaaagataaaggtgggttaatatccttcatcactttacatgttgcatcaacagaaatgttgtccaacagaaaaatacaaacaaaatgtgtagaggaagtgactatcaacgaagaatactacgaggttccacaagctacagcggatatcattaatactgcgaagcaaaatggcggacgtatttttgccgtaggaactaccgttacacgatgtctggaatctgcgtattcgagggaacacaattgcctcaaagcaagttctggctggactgcgctttatatacatccaggctatcaactgaaagtggttgactgcctgctaacgaacttacatcagccaaaaacgacgcatatggtgttaactggtcagtttgctggggttgatctactcattaaggcctatacctcagaacatatccagtcatgtcagttcgatatgtttggtgattgcatgttaatcatacaagatgaagggcagggatgaataaaataaaaccggtacatataatgctaccggttttaccgagaataagcatcaggggattcgggcaataacctttatttcgaaatcaaagccggccagccaggtaacgccaacagcggtccagttaggataagggggatgggcaaatatctcctgtttcaccgccatcacgtcgttaagttgttgctctggatcggtatggaaggtggtgacatccactatgtcatcgaatgtgcatcctgctgcagtcagtgttgctttcaggttttcaaaagcaagcctcacttgtttttgaaaatcaggctccggcgttccgtctgtgtgactgcctacctggcctgaaacaaacagtaaatcaccagaacggatggctgcggaatacccatgttcctcatacagagaatggcggtcagcaggaaaaaccgcgatacgttgcgtcataatgttatcctcagatagcgtaaacacttcgggcgggaataaaatgaatgtcacatacacaacgtaggccatagtttcatatacgtggcatatgtcaaggtgccgtcacataaaagaactgagcctgtttgtcgtatcgtttgacgggaaagagagcattttctgagtgattagcttctgtgtcgtgtcattttgtagacggcatcattttcacgctttccaacaccaatgacagttaccgtgataatttcatcttcgacgctgtacaccagcctgtatcctgcaccacgcagcttaattttgtactgatcctttcttccatgtaattgagaagccggaacccgagggttttcaagccgttcccttagcttttttttaaactgttcctgtatggtatgacccagttttttccactcttttagtgctgattcgttaaatgccagcttataagtcatcaatgttgacctcaatgacgcgttcattcgcacgctcatcgataatacgaccgagttcttcatcctcaagaatatccataagatgagcataaagtgccggaggcacacagtagaaagccggttcattgcggttaagaatggcaactggagcgccatctccggcattgaaagttcccattggatcacgtttcagttctgtaatgcttgctgcagtagtcgttaaaatttgaaatgccataatttacctcctggttgatgactaaatatagcacctttaatagtactaataaaagcatccttcacgaaggggattcagctccagcccggtcagtgatgcgggcagctgacggttttttcaaggctaatttcagatgtccagaacctaacttatgaccactgaaaccggcgtcaataactcgccaacccttatcaagcgtgatgtaacaaccgaagtcagccttgcagatggtgatattattttacttggtggccttgctgaacagtcggatggattattctggcctctgacgtgtcgcagattgcagatcgtacagtcagggattacaaccgtattgccagaggaagcgataaaatatggtaagtgatactcttgaacagcggatttatgaactggtaagaagccatgatggaatttacctttttaagaaaaaagaactgacaccgtcaacagatttggattcagatctacagctggaagatgatgaagtactggcattgatggatgatttttttacgacattcaatgtagataaagggaatttctcgatcacaacatactatccgccagaaccaccgctaaaacatttgcttaatccgtttcgcaaaaacgatattcctcaggtgccggatttcacgataggtatgctcattgcgtctgccagggctggttgctggttgtatgactgattcacgctgggggctgctttccgccctccgtcattattgtcaaggctatatgccctaacaagttataggctctataaagatatatattgaacgctaaaataatggactattaggtgacaccatgcccacttataaacaagttgtgaaccatgttaagaaacatgtattgtggaaagatgagtattttgaacgctattatcggctcaatcctgaactggttcagaagcgtttggataaaatttatcaagctgaagatgatctaatggtgcttatcagtactcaattattttgtttcttgcaggctaatggcacgctctattttgatggttgctataaaacagggaaagcagataactcattgctttgtactaatcttgctctatggagtatcgagctagcttgtgatcattttgatattcgggaagagcggggacataccacgaagtttagcgagcagggagagagttggttaacactattcgcctgcaatcaattctctttagttccttattgctatccggccattcagcgcgggtttcaaagcggcgtattgaaagaaattgttccgttttatcgtgaacagaaattgggtatcctggcgatggagataatggcgcgtgaacggggggatacaatcaactgggaagcaatgcaagtgcgtgttgatcctgtctatctggacttttgccaaaacattttattgtcatcagatgatgaactagtccgcaccggattaattacgctatgtgataagcatcttgagtggaccgattttcataatagcgataagcattgttgcttgactggctatgaaattcagcgtcaggatctattactctggccatttgaatatcaggcggtaaaaaactggcgagcacgtcaagggttaagtacaccaatgattgaacatccattgatgaatagcccgatgacgacagcgaattgtcctgacttttcgcagtggcagcgtccagagtggttcaatccgttagttgattttttggcgcagcgcaggcctgagctggcatttttacgacatctctttatttaagtgagcgattattgtccagttttctctgggcctggcgcgcaactccaagcacatgacccagtcttttattatcaacaattgcgacggggtccacctccgacaaccggtcgaaggtggaataggggagcagaacgccattcagccgcagttccttatgcccgtcaggataatgccagacttcgatatatttaccgatggcccggcgactgtgctcgctgtcctcaatctgtggattcagatttcacaaacagcaggtgcatcaggcgactggtggcatagtcaacatagaccaaagcagtacagggtcgaccccagctttcaaaccagtggtggtcgcagccatcaatttgtatcagctcgccagtacaaggccgcctgtaacgaggctgatgaattttcggcgcgcgttatctgcgagggatccagattccggcttttatcatgaggcgtcggatagtttccttgccaagaaccagaccgtgaacttcctccagattttccagcgccagcgtggggccaaaatcacggtagtgctcccggattatacagagtgcctgatctatcagtgaagttggcaacagatggttaccaacgcggccacgactatggttgttcatgccaagtggtccgagttggcgataacgtttcagcagccgtctgcaatggcgtggcgtaatgccgagcatctcagcagcctgaccgggatgtaaattgcggtcgatggcatcctgaaggattttgaggcggttgattcctttcacggtgaacatcccggcgtcatgtctgagaactatagtctggacaatatgagccacaaatagacattagcattgagcctctacaagattggtgcgcataatgtatattatgttaaattcaccagaacatttaaaagacatgttaaagcggctggattcgtgtatgtcaaaaaacttctggcccataagtttgatcccttccctgccgtgacgctgcgcgaattctgttgatttgcacccgcttatcctgcacacgatttcacgcagcacacgccacgcaggcataaaaaaaccggccactgtgaccggttcgtcgcgcaggtttttggctcagtgggttttaccctggtccgctgctttttctgactgatgttctgcagctctgacaacggctataaacgctttgatacccggatccacatccggcgacaacatgcgcattgttgatttggcattcctgccgaacctcgtcaaaaatcgcaggataaccgaacgtgactttaatcagcgtgcgcagcatccctttggccacttccatttcacccgccataattcgccggcgtccaggtcgttatgatactgacaatacactggaaaatctgacggtcaaagcagcaaccggggaaaaacagtggccagttagcacagcgtttgcatgaactggtggatagttcggggaatcagcggaagaccccctattctcaaccatctcctcataggctttcctgaacaatgtgattgtttgagtaactttacgacaattgcttcaaaaactatcaaatgccagacttccgctaccagacggtatacacagtattactatttctttttatatgccccatacaaaagcgatacgggtgttttttctaatatctggatttcatttttatgtgctttatgttcactaaaaatatctgccagacttttacctccaaaggccaggccaattcccgttgctgctgctgaaagtaatgtcaattgcggcatggcaagtgaagctatacctaacgtggctgttcctgcaaaaattaatccagatgagatcttttttttctttgaattcttaatggctgattcatgcgactttccatactcttcgaccacattgattaaatgttttgaaaaattatttgccgcatcttgcatttgatctggtgtttttccttgcaagtcatgccttgagattcttagttcatgccttaaggattccagttgacctctttctctaatcttttttaattccagatcggaaagcgcagtaaggaattttacttccgcggctgaaaggcccattgtaatcgcttgctcttcagaagaaagaggatttaatttaccataatccttgaccaactgctccgtagtccattcatgtaaaaacatatggttactataaataaccggatcaatgcctaatagtgttgccgataattgagttgatcgttgtgcataaattgcaccttcaaccttacccagtaaggttgctatagctgacggcagatcgtaatccagaagatctacctctcttgttgtaaaactctttaaatctgtatcgtaaacccagacttctttttcgatgttattgaaattattaagcaatgtttttaataattctttatttgttaggatcttctggaatgtttcttcgtttctcccaaagtgctcaagaaacgctaaataagtagcgtaatccatttttctatctttaaaaaagagctggcttagaaaagcggcagattgttcatgattgcgttctttatcaaaatccagtaattcaggaacgattagaaaaattggataatcatcatcaatagtcataaacgggatggcgcgaaatagattagaaacatgttcaagtaataccaacctgcgcatgcggacataactattatctggtggcaatgacaaaaatgaatgcagagagctaagagaaggaaaatgtaatggatcaaccattatgatgctatcaaaataaatccccagagatctaaggtgattagatatgttataaccaaagcgttgaatcggaagtaataatcgataacttttagacgcccgcacttctgttataagcgccgcggcgtgagtatcccaaaatttatttagcaacacgattaggtttgtaagttgattatctaactcgggagagctaattagctctttcaggatgaatctacgtaattcttttagttctaaatttctgaatgcatatttatatttttcagaaaaagcgttttccatcaataaaacatattcattctgtatgctttttgtaatactactcatcatctatctccggaaccaccacgcaacgatttcccagtgtagtggttcttatcatgtgtatattgttagtcatgttatcgtagaaaattcagtggtcaataactcattgaggtagctactaaaatttgcagttaccaggatttaggatgattttaaaaatgtttataaattcaggctgcgccgcagtgattgcactgatttccacgtaacatgataatcaatggctttgataccctttaaacgaacaaatatgagcttaacatggcgacaataaaggatgttgcatccatggccggtgtatcaaccgcgactgtatcacgcgtcattaaccagaccgcgtgggttgaacccgtcacgcgcgaacgtgtagagaaagccatgcgcgatctcaattatcgccggaatgccgccgctatcgcgctggcgaaacgcagcggcgatatgctcggattgttaaccggcaatctggctgatcctttttttgcccgccttgctcgcggcgtagaagatgtttctcgtaagcagcagtatcgcttgatggtatgtagcggcggccacgacgaagaaatggaaaaagcgggactggattttctggttaatcaaggttgtgaggctattgttgtacacgccagccgattaccggataaagagctgctgcgctacgcagcccactttccagcgctggttgttgtgaatcgttatatagccggtatggccaaccggtgtatctggctggaaaatcgcagcgccgccagggaagcgacccgatatctcctggcgaacgggcatcggcgcattgcctgtgtgacatctgacttgccaattattgatcgtcaggaacgccttgatggttaccgtgaggcgctggaagaatatggtatttctccagaccctcgctgggtgattagcgttccgtttaacgaagaaggcggcgagcgggccgcgcatcaacttattaatagcgggcttccccttacggcagcggtcacgtttaacgatgtgatggccgctggcattatgcgtattcttcatcaacgcggcgttcagcttccgcaacagctctctattgtcggctttgatgatgtggtgctggcccggtatctttatccggcgttaacaacaatgcattatccggtcgaacaaatggcgcgttgtgccgcgcaactggcgatacagttataccagggcattacgccgccgcccagcagcaatcatttcaatgccgaactggtgatccgcgattctgtcgcgccctatttttcacggtgaatgcgtcgtcaacagtaaaaactgtgatggctatcaaattaacccttctcatgtaatcggttacatggacgaaagtaatggatcacagtagtgggaagcgtatccccctacccttgagctaccttactgaccggagctccattatgagtgcatcacaaaacaagaagaaaacgctgtcattgggtttagcgctaatcccagtcatctccatgttgttattgttgattatcggttacggcattatggggctacgtatcgaaccgctccttctgtgctctgcggcggtagcggcaggcattgcatggtggcaaggatactgttgggaagacatcatcaactcagtggtggataagctggctaaagcaatgccggttatcatgatcctgatctgcgtgggcggtttgattggctcctggatgtttagtggcaccattccctacatggtgtactgggggctaaaactcataagcccggaatatattttgattgcagccttctttttaaccagcgtggtctccgtctgtaccggtacatcgtggggatccgccgggacggttggcgttgcgttaatgggggttgccgccgggctggacgtgtctcttgcagcagcagctggcgccgttgtttctggcgcttatttcggcgacaaaatctcaccgttgtccgactcgactaactttgccgcgattgtcgcagacactactctgtttgagcatattcagcatttactttggacgaccctgccaagtttcctgcttgccgccgtggtttatcttatcgccggacacagtaatatgctgggcgaggtggctacgccgcagcgcgttacggacatcatccactcgctggagtcgctataccattttaatattgttcttattttgccgccggtgatcgtactgtggggcgcaattcgcaaaaagcctgtcatcccattaatgttaagcgcctgcgtacttgccttgttcctcggcgtcatcatgcagggactgagcatcaaacagggactggacgctttcattgatggatttgatatcgccatgttcccacaaggcgcagaaggtgtcgtggccgatgttccgcgcctgctaaaccggggcggaatgttctcgatgatgggaacaatactgttagttttctgcgctttttcatttgccggagcgctaacgttaaccggcgcgttaacaatcatcattaaccgactgctgaccattattcatagcgttggtcaactcattgccgccactatcggcaccacaattttggtcacaggagcgaccagcgacggtaaactggcattgttagttcccgccgaactgtttaaagatgcctatcgtcgtatggggctggatactaaaaacctttcacggacgatagaagatgccggtaccgttatcgaacctctcctgccgtggacctcggctggcgtctacatggcaaccacgctgggcgttagcacgcttgatcttctgccctgggctatccaatgctatgcggcaatcttcttcgcattaatttatggttttagcggaattggtattgccagaactgcctccgcctcagaaaagtcgccgcaatcgtcagtgacggaataataaggaaacaagatggattttaaccagattatcaatcgcaacaatactggttcggtaaagtgggattttattgagcgtcactttggcgatggcgcagggaaactgctgccgatgtgggtttctgatttcgattttgcctgcccgcctgaggttcaggcggcattgcatcagcgaatcgagcacggcgtatttggctatagcgaacgcgatgaggcctattttaacgccctgcttcactggttttcatcacgccaccagctcacgttaaaacaagaatgggtatgcagcgtggaaggcgtcgtaccagggttggcgctcttagtgcaaatgttgacgcatccaggcgacggcgtagtggtacaggggccatactatggctccttcgccaaaataatcacgcttaatggtagaaaactgctggagaatccccttagcgagtcgccggacgatggctaccagatggatttttgccaactggaaaggctgtttcgccatgagcgccctccgctgatgattttgtgtaatccacataatccaaccgggcgttgctggtcggccaacgagctggagcaactgcttttattatgtgaagcttatgatgtcactctcatctcggatgaaatatgggccgatctattgctgcccggcgaaacctttacctcggtactgcatttaggggtgcgctggcataaacgggtcatctccgccactgcggccagcaaaacgtttggcttatcgtcgttgcgaatttctaattttctcattcccgatcctacgcttcgccagcgtttcctgtctcgtctggacgctcatgggctggatgtctttaacgccctctccgttcaggcggcgactaccgcatggaatgaaagcagacagtggctggattcgctactggattacctggcggaaaaccgccgctggtttgttgaacatgcgacagagcaccttccctgggcaagaattgtcccggcgcagggaacctatttattatggatggattgtaaaaaactgggactggatgacgaacagctaaaatgggtaatggcggatgtcgcgggtattgctccttcaatgggcagcggctttggcccggcgggcagcggatttatccgtttaaatctgggatgtccacgtacctaccttgaaatggcaatagacggcctgaagcgaatatcggtgaagacaatcaaaggaataccaacaggcggatgaatttttcgggcggtaaactgacaacggtgttatttctgcggcatgatatcgcctgagcgccagtaaaaaaccggccatcaaggccggttgggtccggagcgcggttttactatcaggggcgtctgaataacacgatactgcgcccggccagatcgaaatccatttcttcggtaatccgcattccctgctgcgcgttatcggcagtcgtcagttcaagtacccagccgccttctccccacatcggaatacggaacggtacgctgccttcaaacggattgaaaagcagtaaggcgtcatgccagatccccgcttccggctgaagatcgggacgactaatacatacgcctatggtcgatccctcatcccattgttcggattgctgcgcccctccgccggcgttaaaccagcggatctccagaccgtcacgccagctctcccggcgcagcaacggttgcgtggcgcgcagttgaatcagatgacgggtaaactcccgtagcgcattggcggtttccggcaaattatcccagtggacccacgatatttcactgtcctgacagtagccattgttattgcccatctgactgcggccaaactcatcgcccgctaataacatcggcgtgccgtgcgagaaaagcaaggtggtcaggaaattacgtttctgtcgctcgcgtatcgcattgatgccctcgtcgtcggttggcccttctgcgccatagttacaggagcggttatcattatgcccgtcattattatcttcgccattggcttcattatgtttgtcgttataagacaccagatcgttcagcgtgaagccgtcatgggcagtaataaagttaacgcttgaccaggggcgacggccgcgcaaatcatagagatcgccggaacccagcaggcgtgcggcgaaatcatttgtgacgttgtcacctttccagtattcgcgtaccgtatcgcggtatttatcattccattcgccccaccctggtggaaagccgccaacctgatagccgcccggtccgatatcccagggttcgccaatcagtttcagttttgccagcaccgggtcttgcgttaccgcatcaaaaaaaccgcctctctgatcaaagccttccggctcacgaccaagaatggtgcccaaatcaaaacgaaagccgtcgacatgcattgactccgcccaatagcgaagggaatccatcaccatttgcagtacccgtggatgagaggtattgacggtattacctgtccctgtatcgttaatgtaatagcgatgctgatcgggcatcgtgcgatagtaagagaagttatcgatacctttaaatgacagcgtggggccaagttcattcccttctgccgtatggttatagaccacatccagtatcacttcgatgccggcatcatggaaagcgcgcaccatatcgcggaatccctgaataccttttggaccatagtagcgcgtcgccggcgcaaaaaagcccagcgagttgtatccccagaaatttttcagtcctttatcgagcagatgctgatcgtccgggaaccagtgaacgggtaaaagctcgacggaggtaatccccagacttttaatgtaatccacgctggctttatgccccatgccttcaaacgtaccgcgtagaggctcagggatcgcggaattaagctgggtaaagccttttacatgcgtttcataaataatggcgttcgaccacggtatggaaggccgttgtctatcctcccagttagcctcatccggatcaatcacccggcatttaggcgtaaatggcgcgctatcctggtcatcaaaggtcaaatctttatcgtcatgaagtaattgatacgcgaaatgcgcatcgttccactgaatatcgcccaccagctcacgggcataagggtcaataagcagcttgttggggttaaaacgatgaccattttccgggtcataaggaccgtaaacgcggtacccatacagcgcgccgggctgcaacttcgggacatagccgtgccatatttcgtcagtatattccggtaactccagacgagcgatttcatgctccccgctcggatcgtaaaggcaaagctcgacgcgttccgcatgggcggaaaaaatagcgaaattcacgccttcgccgtcataatttgcgccaagcgtatggctgtatcctgatctgatttcaaaagccctgtttgttgtcattctctttctccacccacggtaaacgttgtcctgtcacggcacatcaacacataaactcagtcgctcattaaaaccagtacgccgccctggtgtgaggccaacgacaggcgttcaccaggcattaacctctcctgggtaagcacattgcgataacgatgctgattaagctgtccgggtataataatgtcggttcctgaccagaaaccgctatgcgattgtgacaataagccgtcacattcggcgaacaccagtcggggcgcaacaacaatcagcgcatcatcatgattgactctggcgtaagcgatgaccttgtcggcacgctgaccaacagcccgcagcggtatatagtcgccaaaacggaagagctcatgattctgctgacgcagacgcagtaatgcggcggtgacatactgattcacctgcccgttcagccaactctcttcgcgcgagaaaactcccggcgtcagttggtctaactgctgcgccagcgtggcgaaatccggttcgcggcggttgtcgggatcgacaagactaaaattcaacgcctcgcttccctgatagatatcaggtactcccggcgcggttaatttgataacggtctgcgtcaggctgttaaccagtcctgcgcggatgaagggttgcaaggaacgataaaaatcctgcaaaaatgtctgattatccggcgccagtaaataacgggcgtaatcaagcattgccgtttcgtaagcctcattactgtccacccaatcggtacgcagcttcgcttcgcgtagcgctttctccacaaaggcttcaaagcgtgttttcagcgcgtttaggcctgtttcatcctgtggttgtagcaccgggggccagacgccggtcagcgcctgatataacatccacgtatccgccgattttggcgcagtgccatcattcaaaaatttgacatgggtctggttcatctgccgccagcgggcaaggcattcgctccactgctccggcgcttcggtaagcgtatacaggcgtgctcgcgcatcctcgcctcgcttggtatcgtgggtcgacgtaccggataacgcatcaggctgtcgcgcctgtcgggttttcatctcatggtgaaagcgttcgatggagaagtgatgcgtgacgggctcggcgccgacttcatttaacgccagtcccatgttttgacgaaagaaaagcgtatcctctaccgatttcgccatcagcggaccggtgagttgctggaaccgaacgcgaaactgtgtcgcctcctcctggctggaggcgggaacatcgccggtaagaagacggctcagaaatgtaagcgcttctggctgcggaggggtttcaagcgtctttacccgttccacaatacggtgtaacaggcaaatatcggtcggtggtagcccttctgccgtgccgtaagtgcgatatacgggaaaggcaattaataactcgcgtaacgcctgccgaacgacgctctcttcctgtgcgatctgtagctcgctggcaatcgacagcgcaagcgcgagcagccgggtaaattccccctcgaaattgcgatcgaccatcagcaatttagccgcccgtaattccgcccgcatatccactggcgcgccttttacggtctcgtaagcctggcgcagattgtctatctgctcatcgtcaaccagcacctccgccagcgaggcgataaattcatagcctgtggtgccggaaaccggccagtcatcaggaagttgctcgcctttagcgagaattttttccacggtgatatagcacgccggccccacttcctgacgtaaacgcgcaagataggctttcggatcggcaaggccgtcgatatgatcgatacgtaaaccgtcaaccgcccccgttctgaccagctccagaatcagccgatgtgtatcgtcgaagacggttttatcttccacccgcattcctaccagccctgtgacctcaaagaaacgccgatatgaaagcgagcgagcggcatcgcgccaggacattaatttccacggctggcgctcatgcaaatcagcaatagcggctttatcggtaagcgccagtatttcagcctcgcgcccctgccacgtcgccggcgcaagcggataatagttatcataataggcgaacgcgggtttacccgtagcgggatcgggcttgatcgcaatttctccgttttccagcacggcgtcaaacgtgtcgcctaaaaaaggcagcgtcagtcggcgcgaccagtcaatatcgaaatggcgcgcgtaacggctctccttgccatattcaagcacgtcgcgccaccaggcgttttccagcgagctggccatgtgattaggcacaatatcgatgatcaatcccagaccttgcgctttaagttcagccaccagtctttcaaatccttcgcgcccgccaatagaaggctcaatctcattcgcatcggtgacatcataaccatgcgttgacgctttggtggcggtaaagatgggtgaggcataaagatggctgatacccagatttttaaggtaaggcaccagcgccgcagcgcgatcgaaggtcatgccattgcgaaactgaaggcgatacgttgcagttgggatcatgatgcagactctccctgggctaagcggacaataagagaatgttgggaaagcgacccggtggattcattcggccaggcgaagagagtcttacccggtaaatcgggcagcaataccgtcgtggcgctaatattcagcgccagtgacagcgttcctcccggaaaacgccagctaacggcaataaacccgggcgcggtttgcaataccgttcctgagctctcacgggcagcggacaacagcggcacgatatgcttctggcgcaaaagcagtagttcgcgggtaaacgccagccacgctttaccctcttcactgtgctgttgcttccagttaagttttgagcgttgaaaggtctctggcgcattcgggtccggaacattttcccctgcatgatcggcaaactcttttgcgcgaccttcacgaacggcgcgggctaaatccccatggaaatcggtaaaaaaaagaaaaggacggctttcgccatactcttcgcccataaaaagcagcggaatatgcggtgaaagcagcaacgtggcgagcaatacttttgttcgttcagcacccgccagggttatcagtctgtcgccctgggcgcggttaccgacctgatcgtgattctgaataaaatccacaaaagcgaccgggggttgtccggtactttttacgccgcgaggttcgccggtttgcggtgaaatttctccctgataagcgaatccttcggccagcgctcttgcgaggtgtttttccggggcatcagcaaaatcgttgtagtaggcctgggtctctccggtcgcaaaaacgtggacggcattatgaaaatcgtcattccattcggcggtaaacagcggcgcattgccatcctgatctcggggatgcagagaaataatattgcggctatcttcggtggtcagatgaatgggcctgtcggtaatgtcttcccgaatacgttgtgcgatttcaaccagcacatgcctggcgctactgtcctcaatctgatcgatagcgtcaaagcgtaagccgtcgagatggtattctgtcagccagtataacggcgcctcgatgatatagcgccgcacggcgtcgacatcataggcgataccatttccccacggcgtcatgcgctctttgtggaaaaacgccggcgccaatagcggtaaataatttccttccgggccgaaatggttcagcacaatatccaggacgacggaaagaccatacccatgcgcggcgtcaataaacgccttgaaatcatccggcgtcccataggcagaatgcggcgcgtaaagcagtacgccgtcatagccccagccacgctcgccgccaaattgcgcaacgggcatcacttcaataacggtaacgccgagttcagcgagataaggcagcttcgctattgcggcgcggaaggtgccttccggagtgaacgtgcctgtatgcatctcatacaccacggcctgctcccaacggctacctttccacccggtgttgcgccacgtgtagctgcctggatcaaccacatatgacggaccgttgacgtcagttttttgggcgcgggaagccggatcggggaccaccatgccatcgctgagtacaaagttatactccgtacctggcgtcaccccggcgacgtccagcgtaaaccagccgtcaccgttcgcctgcatttcctgatctttacccgcaagcctgagcataaccttttgctgaccggtggcccaaagacgaaagcggacaacatcagcggcgatatattcagccccccagcttttgcaaaaaatttttgaactcatttgtcgctccgtttaacccataacctctacaacatccgaagaacaagcatagactatggggctaatctttacgtgacgctgtcacttaacaggcattctttttcgtatctgcgtgtaaaaccgtggaattattgtcgggattgctcagatgtaccgaagtgcgcggtatcgcctcgcccgtgttcgccagagccctgaacacgctgtagctggataacctctccctgctcccaggcgttagcccccttaacaacgggatgttcaggcagatcctgccgctcgcgtttaatggcttgggtatcaattcccagacggcgatcccgatcggccagcagcgcggggtcaagctgcccgtcgccagtaaagcccatcatcagcgcagggatacccattggcagggttttatcccggtcggtatgccaggtgtgccaggtcttgccataagtattaacaatcttactcatcaacgctttatcagcgacctgcggtaagccaggcgccaccaggctaccggatttcacctcgtactggtggctgtgccacagttttttctcctcgggaggaagcgttttaaataaacgttcgctgataatgtactccacccccatcaggcgcgcgtttttcgtattgccgtcgtaaatcaccgcctgcatgacatcttcgttcaggacggtaacgtaatggtgcgcttccatctgtccgtttttatcaccgctataaaaatggaacccgtcaaggtaggtactgatggcatcgacaggtggtctggattgaatagccgccgcgcctgtttccagggtacgtaatttggcagaggttttttccccgggaataggtgtttgcggcggcgtattattggcgccgcatccggccagaaaaggaatgataaagagtgccagcggtaaaattttcattaggtctccatatagtgaaagggctctaatgaaaatagtgcaataccacgtgattggtagaagaaatggaagatgttatttgtgacggtgtcacaaatagtaaaacccgacacacaggccgggttttgatatcagtttactcttattttgagagttctttcttgatttcgtcttttattttgcttaattcactctgcgggtttttcttacaaagctcaacggctagcggcactgctgtcgtctcagtttcctggaaatctacgtagtccccgcctttaaaatcttcatcttcattcagcacccagaaagcgactggcgccatcgtctgcggattgaggtcaacaaactcctggcagctcatacctttaggcgtaacgtttgttttagtagtatctgttgccgcattcacgctaacactggttaccagcgctgccacgataatacctgctgtagcaagggagaatttattcattgttgttgctccaataattatataaataacctctacatctgcgcgttaacccgttaatgtagaacacagaaaataatacccctcctctctcaggaataaagatcaccctccgtgatatggctattattgatatttacgttgactgattttgatgtttgatgaataaagcaacatggcgagcagattttaaggcgaaaaagtaggccacgacaatagccgcagacgtggtctacggcgcgttgaggtgatagaaatacggcaggatctcagatagaccgggagcgagccctccgtctgaaagtatattcatcagcccgatcaacccatcgttaccgggctggagaggttatcaggcgttaagctggtagtcgagggtgatttccgcattcagaacctgcgataccgggcacccggcttttgctttctggatgatttgatcgaaagttgaagcatcaatatctgctaccgcgactttgctttgtagcgcaattttggtaatggcgaagcccgcctccaccttatcaagcgatacgtcagcggtggtgtcaatggatgtcggcgtaaatccagcctctcccagcatgagtgatagcgccatggagaaacaggccgcatgtgcggcgccaattaactcttccgggttggttccctgcgcgccttcgaaccgggtattgaatccatacggttgttgattaagcacgccgctttctgttgatacagtacctttaccccgtttgatgtcgccttcccagtgtgcctgacctttcttatggattgtcatttttgctctcctgttggctcaaaaaataaagtatagaccatgctgctaatctgcgttgtccatgccgatggaggtagcatgttgtcgattacccgcacttcagatatagaaaatagttgtatgttttttcagtgatgaatattaaaccaacagggctccctttctttaaagaatatatccctccttttgtccttactttttcttctggaggcgtattccattatgtatattttatatgtatattgagatttatcctatcccattgtaataaaggataaaaatcacaataagtagccttttaaatgtatattaattgaccactatttgtatgaggatatgtaattggcaaacgtaatatattttcttcaggggtaaacaattagagttccgccttgcgttaaaataactccaggactaatcttaaccacagccgcaaaaatatttgccatgctgaatacgaattaattttctgcgagccgtactaaataaatacatgttcacggaggcattatatgtttacttatcactcagcaaatacctcagcagcacaaccggccctggtcaacgcgattgaacaaggattacgcgcggagttaggcgttgtcactgaagatgatattttaatggagctgaccaaatgggttgaggcttccgacaatgacatcctcagtgacatctaccagcagaccatcaactatgtggtaagcgggcagcacccgactctgtaaaacctgctatgctgtatcggcaaccttaggggttacgtttctttcgcgtaagcgaatttgtccttaaaactagcaacaggattgaggagttaacatgaaatcgaaccgtcaggctcgtcatatacttggactggattacagaatttccaaccagcgtaaggttgttactgaaggcgacaccagcagcgtggtgaataacccaaccggcagaaagcgccgcgccgacagccaaaagtaatcgtacagtcctgaaatgacgttaaacaccattgcatctgcaatggtgtttttgtttataggaatgaccttaacgtctcacaatgctttatactcagggtcggttccctggtggaaggcaatatatgatgataaacgacggtgccagggacagttattcgaaaaagagtgagtaacatggaaactacaaccaagaaagcacgttccctttatatcccttacgctggccctgtattgctggaattccccctgttaaacaaaggcagcgcttttagcgtagaagagcgccgcaacttcaatttgtcagggctgctgccagaggtcgtcgagtcgattgaagaacaggccgaacgcgcctggctccagtatcaggggtttaaaacagaaatcgataagcatatttacctgcgtaacatccaggataccaacgaaacgctcttttatcgactggtgcaaaaccatcttgaagagatgatgccggttatctataccccgaccgtgggcgcggcctgtgagcgcttctctgagatttatcgccgggcgcgcggcgtatttatctcttatccgaaccgtcacaatatggacgacattttgcagaatgtgcctaaccacaacattaaagttattgtggtgacggatggcgagcggattctggggcttggcgatcagggcatcggcggaatggggatacctatcggtaagctgtcattatacaccgcctgcggcggcattagtccggcctatacccttcccgttgtgctggatgtcggcaccaacaatcaacagttactcaacgatccgctttacatgggctggcgtcatccgcgcattaccgacgatgagtattatgcgtttgtcgatgagtttattcaggccgttaagcagcgctggccagatatcctgctacagttcgaagatttcgcgcagaaaaacgcaatgccgctgttgacgcgctatcgtgatgagatttgctcctttaacgatgatattcagggcaccgcagccgtgaccgtcggtacgttgatcgccgccagccgcgctgccggcagtcagcttagcgagcagaaaatcgttttcctcggcgcgggttccgccggatgtgggattgctgaacagatcatcgcgcagactcagcgtgaaggtttaagcgaagatgccgctcgacagaacgtttttatggttgatcgcttcggcctgttgacggaccggatgcctaatttattgccgttccaggcaaaactggtgcagaaatgcgacaatctccagcactgggataccgaaaatgacgtgttgtcgctgctggatgtggtgcgtaacgtgaagccggatattctgatcggggtttccggccagaccgggctctttactgaagagatcatccgcgagatgcataagcattgccctcgcccgatcgtcatgccgctctctaatcccacctctcgcgtggaggccacgccacaggacattatcgcctggacggaaggcaacgcgctggtggcaaccggcagcccattctcgccggtcatctggaaagataaggtttatccgatcgcacaatgtaataacgcctatattttccccggcatcggacttggggttatcgcttccggcgcatcgcgcattactgatgaaatgctgatgtcagccagtgagacgctggcgaaacattctccgctggtgaataacggcgaaggattagtgttgccagcgcttaaagacatccaggtcgtgtcgcgcgctatcgcttttgccgtaggtaaaatggcgcagcaacaaggcgtagcggtgaaaacctctgcggaagcgctgcaacaggcgattgacgataacttctggaaaccggaataccgcgactaccgtcggacttccatttaatacgtacccggcggtgaatgccgccggatatcactttcttctttagttttggtgagtctgtcgacacacctgaattcctttccctgcttatttgtcaagctactaatattagccacctttatgtattgaacggggatttatcaggataatcctggctaaactattacattgtatttctgccgccttgcataactcatcagaaatattaatcctaaagaggtaatagcgccttacctgctattacttacctgctatgcagttcactattaataaaaggagaaggttatgaaagctgctgttgtcacacaagatcatcaggttgatgttactgagaaaacgctgcgtccccttcgccacggtgaagctttgctaaaaatggagtgctgcggcgtatgccataccgatctacacgtgaaaaacggcgatttcggtgacaaaaccggcgttattctgggacacgaaggcattggcgtcgtggcggaagtcggtcctggtgtcacctcgctgaaacccggcgatcgcgcgagtgtcgcgtggttttatgaaggatgcggacactgtgagtattgcaatacgggcaatgaaaccttatgccgcaacgtgaaaaatgccggttacacggtagatggcggtatggccgaagagtgtattgtcgtcgcggattatgcggtgaaagtaccggaaggtctggactctgcagcggcaagtagtattacctgcgcgggcgttaccacctataaagcggtgaagatttctcatattaaacctggccagtggattgccatctacggtctgggcggtctgggtaatctggccttgcagtacgcgaaaaacgttttcaatgcgaaagtgatcgccattgatgtcaatgatggacaactgaaactggccgaggaaatgggcgcagatctgaccattaattcacgtacggaagatgcggctaaaattgtgcaggaaaaaaccggtggcgcgcacgcagcggtggttaccgcggtcgctaaggcggcgtttaattccgcagtagatgccgttcgcgccggaggccgcgtggtggcagtcgggttgccgccagaagccatgaaccttgatatccctcgcctggtgctggatggcattcaggttgtcggttcgttggtggggacacgccaggatctgaccgaagccttccagtttgcggcggaaggaaaagtcgtgccaaaagtcgctttacgtccgcttgaagatatcaacgttatttttaaagagatggaacagggacaaattcgtggccgtatggtcatcgatttccgtcgttaaacgatttgctgtggtcgtctgagtatacagacagcagatgaaaacaaggcgctaccaggatagcgccttgtttatcagattgcgaaagaattactgaataccttcttcgctctctttttttgcttccgccttctcgatttcacgataccagcgtggatgatgtttcttcgcccagcgacggctgaccttcccttcgatcatgcctttaatcgagcctttcacccaaaatgccatatacatatggatgaggatcgcgtgcattaaaataatgcccgccgccgcatgaatcaacaggctataacgcaccacctgcatggggaaatactgcgcgaaatacggacgccagataatcacgccagtcaccagcagcacaaaaatcatgctcataatggaccagaacatcatcttctgtccggcattgtatttaccgacatccgccaccttatgctcattgcctttcaatacttcgacaatatttttcagccacggaatatcttttttatccgggatgttgtggtggacgaaacgcacgaacataaacatcagcgcgatgaagatggcaataccgaagaacgggtgcaaaatacgtcccatctgcggcgtgccgaaagtttgcgtcaaccattgtagcgtcgggaagaaaaacgaaatccccgacagcgctaccaggaagaagcagatcaccaccgtccagtgacaggcgcggtcgacaaatttcgtgcgcacaatcattttcgacttactcatgatgatcctcctcatcgtcgtccgtttctttattcgggccaataccgatgtagtggtaaatcagaccggcgaaagtggcgataaagcccgctgcggccagcggttttagcgcccctttccacagattgattgaggtatcgatctgcggatctttcggcaagccgtggtacaactccggctgattggcatggtgcagcacatacatgacgtgcgtaccgccgacgccctgcgggttgtagataccggcatgttcaaagccgcgcgcttttaacttctccacgcgttgctcacccagttccagcatctcttttttggtgccgaagtgaatagccccggtcggacaagttttgacgcaggccggttcctggcccacgctgacgcgatcgacgcagagcgtacatttataaacgcggttgtcctctttgttgaggcgcggaatattaaacggacacccggcgatacagtaaccacagccgatacagtgttcagattgaaaatcaacaatcccgttcgcgtactggatgatagccccggcagatggacaggctttaagacagcctggatcttcacagtgcatacaaccatctttacgaatcagccactccagcttgccgttctgctcggtttcggtaaagcgcatcaccgtccaggacttggcgctgagatcggcagggttatcgtacaccccgacacaatgaccaacgttatcgcgaatatcgttccattcagaacaggctacctggcaggctttacagccgacacaggaggagacgtcgatcagtttcgcgacttcggctttgtaatcacgcgcctgcggaggcggcgtgatggcgtttgttgcggaccgtttaataatgtcctgcgtttccatagacatatgttcgcctcccttacgccttctcgatgttaactaaaaacgctttgtattccggcgtttgcgagttggcatcaccgacatttggcgtcagagtattggcgatatagcctttgcgcgcgacaccctcaaagccccagtgaatcgggatccccaccgtttcaacctgctgaccgttgacatgcagggtgcgaagacgacgagttaccaccgcgaccgcgcgaataaacccgcgtttactgctcaccttcacatagtcgccgttagcgatacctttcgctgccgccagcgtctcactgatctccacaaactgttccggctgagcgatagcgttaagtagcgcatgtttggtccaggtatggaaatgctctgtgaggcggtaagtcgtgcccacgtacggaaactgctccttcttacccatgcgcagcgcatcttcttcatacagacgcgccgccgggttcgagaccacattcgggtgcagcgggttagtgcccagcggcgtttccatcggctcgtagtgttcagggaacggcccttccgccattttatcaatagcaaacagacgtcccagcccttccggctgcatgataaatggattggtcccgctccccggcgccgcgttgttaaagtccggaatatcgttccctgtccacttcgcgccgttccactggatcagcatccgttttggatcccacggtttaccctgcggatccgccgaagcgcggttatacaatacgcgacggtttagcggccatgcccacgcccaacccagagtattgccaagccctgacgggtcggcgttatcacgtctggacatctggttgccctgctccgtccagctaccggtataaatccagcaggaggaggatgtcgtaccgtcatcgcgcagtaatgcaaaactgctcaacaactggcctttcctggcaagcagtgtaccgttggcgtcatagagatcttccagcgcatagccgttgttctctttcgccacttcttccgaatgcggttcatccggctgcttgtagttccagctcatcttcaatagtggttcggcgcctttaccgccttctgcgcgatacatttcacgcagacgatggtaaataccggccagaatctcgccgtcgttacgcgcttcgcccggcgcgtcctgacctttccagtgccactgtaaccagcgaccggagttagcgatagagccatcctcttccgcaaaacaggtagacggcagacggaagacttcggtctgaatcgttgtcggatcgacatcattagattcgccgtggttctgccagaacgttgacgtttcagtcaccagcggatcgataacgaccagatacttcagtttgcttaagctttgcaccactttgtttttgtccgggaaggacgccaccgggttaaagccctgacagaaatagccggtgactttcccgctatccatcatgttgaaatatttgatcacgtcataggactgatcccacttaggcagccaggcaaagccccagtcattctcttgctgcgccgcatcgccatagaaagatttcatcaggctgacgaagaacttaggataattaccccagtagttgacctgatcggccagcgtcgctttgggggtattcgctgccagataagtttgcagatcggcctgtttttccgatggcagcgtcagataacccggcaggctggtggagagcagtcctaaatccgttaagccctgaatattagagtggccgcgcaaggcgttcacaccgccgccagccatccccatattgccgagcagcaactggatcatcgccatagtacggatgttctgcgccccgacggtatgttgcgtccagcccagcgcatacaggaaggtggtagtgcgatccggaacgctggtagaggccaacacctcacacaccttcaggaaatccgctttcggcgtaccgcagatgttttccacgacgtccggcgtgtagcgcgaaacgtgctgcttcagcagattccacacacagcgtgggtgcgtcaacgtttcatcacgtttggcatagccgttttcatcaaactggtagttccaggaggatttatcgtactgacgcttttgggcgtcatagccgctgaaaagaccgtcatcaaaggcaaaatcatcccgcaccagcaggctggcgttggtgtaatgcttaacgtattcagcgttgattttgttattttcgatcaggtacagcaaaacgccggacagaaaggtaatgtctgtaccggaacgtattggcgcatagatatccgccaccgacgccgtacgcgtaaagcgtggatcaacgacaatcagcgtcgcatcgttattgtttttcgcttccatcgcccagcggaaacccaccggatgcgcttctgcggcattgccgcccatcaccatcacgacgttggcgtttttaatatccacccagtggttggtcatcgcaccgcgaccaaatgttggagcaagacttgctaccgttggtccgtgtcaaacgcgcgcctggttatctaccgccagcataccgagagaacgcgcaaacttctgcgtcagcatacccgtttcattgctggccgccgaggcgcacagcattccggtagagagccagcggttaaccgtgacgccctgctcattcttttcaataaagttggcgtcgcggtcggctttcattaatttagcaatacgagtgaaagcgtcatcccagctaatgcgctgccacttgtcggaacccggcgcgcggtattccggatagcgtaggcgatcttcactgtgaacatagtccagcaaaccggcccctttcgggcacagcgcgccacggcttaccggatgatccgggtcgccttcaatatggtaaatcgcttctttcgcgttttttgccccatctcccaggctatacattaatagcccgcaacctacggaacagtatgtgcaggagttacggatctcttttgcgcgcaacagcttatagtttcgcgcctgagccagggccattttaggggtaaaacccagtgcggccaccgttgttcccgccataccgcccgcgcagattttaaaaaattgtctgcggctgacgtccattgctttcctcttttttccacggatgcacgcctccttcgaactgcagcaaaacctcagcccaggatgcgtgtataacttcgcgaggaaactaacagcaaaatcgataacttttttgcgtcaaatcaatattgaaacggttccgctattaaatagccctatttttaaactgcaataactccagggaggtactaaaaaatgacactgcatggcatcgccctcggaaaaagtgctataagtggcagtttattttgcgcggtattcaggacagtcacaaagcatgacatcacaaaaagcaacgctaatagggcttgttgccatcgttctgtggagcacgatggttgggttaattcgcggcgtcagcgaaggtctcggaccggtaggcggcgcagccatgatctattcattaagcggtctgctgctgatttttaccgtcggattacctgatatccgccgtttcccggggcgatacctcatcgcaggcagcgtactgtttgtcagttatgaaatatgcctggcgctttctctcggttatgccgccactcgccatcaggctatcgaagtcggcatggttaactatttatggcccagcctgaccattctgtttgccattctttttaatgggcaaaaaactaactggcttattgttcctggattgcttattgcacttactggcgtttgctgggttctggggggcgagaatggtcttaatcccggagaaattatcagcaatgtcgccaccagtccgctaagttatttactggcatttcttggggcgtttatatgggcgacgtactgcacggtcaccaataaatatgcgcgtggttttaacggtatcaccgtctttgtgttactcaccgccgtggcgctgtggttacactattttcttacgccgcaacctgccatgatatttagcctaccggtgattgctaaactttttaccgcggcattaacgctggggtttgcctacgcagcatggaatgtgggcatacttcatggcaatgtgactatcatggccgtagggtcttattttacccccgtcatgtcctctgctctggcagcgctgttactcagctcaccactgtcattctccttctggcaaggcgcagtcatggtttgcgtaggttcgctactttgttggctggcaacgcggcggcgctaatagcgacgggcgggccgatattgatattaaatcgacccgctgtaccttgacactcttcataacacaactacgcttttatctattgcctgtgcgtatttaacgattttccattttcacgtgctcctcctgcgccataccaggattgcgctggtaaaaatgaattttataaaatcgttaaatatgttaatgtaatgatgtaattatattaacaaatatataattaacgttagcttgcaactgttattagtgcatataataatcagtggttactaccaaaaataaaaccataaacagcccaatagtcccctccgaaaatatatcttattagacagtccctatttgaattaatactctcaaatgtattaaggagatctcgatcacacaaattaaaataatttgtaatcttatgaaacttattattgaacttatgccactccgtcatttaaaaatagtctgccattgacaaacgcctcgtttaacaatggttgaggaaacacgctaagaaaattataaggattattaaaatgaaacttaagttagtggcagtggcagtgacttccctgttggcagcaggcgttgtaaatgcagccgaggtatataacaaagacggcaataaactggatctgtacggtaaagttcacgctcagcattatttctctgatgataacggaagtgatggtgacaaaacttacgcgcgtctgggctttaaaggcgaaacgcagatcaacgatcagttaaccggttttggccagtgggaatatgaattcaaaggcaaccgtactgaaagccagggcgctgacaaagacaaaacccgtctggcgtttgctggtctgaaattcgctgactacggttctttcgactacggtcgtaactacggcgttgcttacgacatcggcgcatggaccgacgttctgccagagtttggtggcgatacctggactcagactgacgtcttcatgactggccgtactactggtgttgccacctaccgtaacactgacttctttggcctggttgaaggtctgaactttgccgcgcagtaccagggcaaaaacgaccgtgacggcgcgtacgagtctaacggcgacggtttcggtctgtccgcaacgtatgagtacgaaggttttggcgtaggtgcggcctatgcgaagtctgaccgtactaacaaccaggtgaaagcagcgagcaacctgaatgctgcgggtaaaaacgctgaagtctgggctgctggtctgaaatatgatgcgaacaacatctacctggcgaccacctactccgaaacgctgaacatgaccaccttcggtgaagatgcagcgggtgatgcgtttatcgcgaataaaacccagaacttcgaagcggttgctcagtatcagttcgacttcggtctgcgtccgtccatcgcttacctgaaatccaaaggtaaaaacctgggtacttacggcgaccaggatctggttgagtacatcgatgttggcgcaacctactacttcaacaaaaacatgtccaccttcgttgattacaaaatcaacctgctggacgacagcgacttcaccaaagcggctaaagtgtctaccgacaacatcgttgctgttggtctgaactaccagttctaattttgttgtagtctgaatacaaagccagtcctttcagggctggctttttctcttgatgtagactcggtcataaggagtatgccgtgcagacgttcactggtcgttgtctttgcggacagagccattttaccgttgacgtcgaaatgctggatgtctatgcctgccattgtacgctgtgtcaaaaatggtcgggtggaatagccatgtatctggaagcctgcgggcaaccacagctagcccccctttccccggaaccgccatacttttcatcctcttcgcgcggcgaacgctacttctgttccggctgcgggtgtccgctgtggtttcggcttaccgataccgatcgctattttattccctggaccttactggaactgaacgaagttgatcgccgtcggctgattctggctgcggaaatttataccgagacccaacctgccttctggcgactgacggggcaatacgcacgcctcagcggtaaagaggttgaggaaatggactccccctgccagctagcgcattaagcgcttatctcaccaggcgttatgttatcggcgttgggcttttgccaggctgaaccacatccctaccgccagcaaaagaagcatactcccggcgctgcttaacgccacgctatgcgaccagataaaggcatgtctggcggcgtccagtattgcctgcccctgcgtgggcggtaggctattcgccaactgcacggcttctcccattgaagatgacgctctggcaatctcttgcgcctcaagcccggcaggcagacggatagacgcggagaagctacggcttaacaacagaccgaaaatggcaatgcccagtcccgcgcccagttcataagccatcgtttctatcgcgccggccgccgccgctttttctgccggcgcagcggccataattgccgacgtggaagccagcaatgcgctggcggcgctaaatcccagcagcgccatcagcccccaggcctgccattgttgggtgctgaaatccgtcatcgccaggccataaaaactcagcgcgcttaacgccatgccgcccgtcgcgaccagccgtagtcccagacgcgagaccagcacgcccgcaatcggcccgctgaatccactggcgaccattaccggcagcataaataccccggcctcataaggcgatagcccgtgaacaaactgcagctcttgcgccatcagcagctcaaaacccaccagagtgatcatcgcggtcatcgccatcacgacgccgctcaggataatgcgatgggtaaatagtcgcatatcaatcatcggacgcgatgtcgcaagctgtgtgcggataaagagtcccaggagcagcgcgccggtaagcagggtaaacgagataacccacagcgacagatgccctttcagcgcggttttagcgctatagaccaacagcaaaatggcaataatcagcatcaccgcatggccaagattgagcggttgatcgcgacggcccgcctggcgaggaacatagcgggcggttaagcccatgacgaccagcacaatcggcacgttgatcaggaaaaccgatccccagtaaaaatgctctaataatatgccgccgatgagcggcccaaacgccgctccgcccgaacctaccgctgcccagacgcccagcgccatgttgcgatgcttctcttcacaaaaggtagcgcgtattccggccagcgtcgccggtacaatcatcgccgcgccaatagccagtaataccctggtggcgataagccaactggcggtatgcgaaaacgctgccgccaatgacgccaggccaaagagcgtcccgcccagcatcagcaggcgtttaaaaccgatacgatcgccaagtgcgcccatcggcaacaccatgccagccatgaccaaagaataaatatcaatgatccacagcagctcgttgccgctggcccccagtgtcatactcagtgtcggcgcggcgacatgcaagaccgtggcatcaatggcgacaggaatatagaccagcacaataatgactaacgttaaccactgacgaaacataactctcccttcaaaaactcaaatttggacgcttgtccagcttcaggatcctacggtaagttgaacgaatgtccagctttttgttacactgcgcgcattggctaatgtggggaaaatatgagttaccttaaccgggatgaacgccgcgaagtgatcctgcaagcggcgatgcgcgtggcgctggcagaggggtttgccgccatgacggtgcgacgaatcgcatcagaagccgatgtcgccgccggccaggtgcatcaccacttcagctcggcgggcgagctcaaagcgctggcctttgtccatttgatccgcaccctgcttgatgccgggcaagttccgccgcccgccacctggcgtgcacggcttcacgctatgttgggtagcgaagacggcggctttgagccttacataaaattgtggcgagaggcgcaaattctggccgaccgggatccgcacatcagagatgcttatctcctcacgatgcagatgtggcatgaggaaacggtcacaattatcgagcagggcaaacaggcaggagaatttacgtttactgctaacgccacggatatcgcctggcggcttatcgcactggtgtgcgggctggacggtatgtatgtactggggattccggaaatggccgatcccgcgtttaaattccatctggatcgtatgattacgcttgaactctttgcgtaaagttacaaataatttaataaaaatcgcttttaatttacaaatagtaacaattaagaaacatcatatctcctcatcgcgccgcgctggcctggttttttatctattctttcactcaatattctaaaaaaacttcaataagttctcaaaagagcgcgtgacgctctgtctcttttttgtgtttttcttcaaatgatatgcgcatgtgaggggtaaaatgacacgacaaaacgagaattataaccgttatctcttgagtgactggcgacccgaaaatccagccttctgggagaataaagggaaaggcatcgccagaagaaacttatggatttcagtaagttgtttgctcctggcattttgcgtctggatgttgtttagcgctgttgccgtcaacctcaataaaattggatttaattttaccaccgaccaactctttttattaaccgcattaccttctctttccggcgcaatattacgcgttccctactcctttatggtgccactgtttggtggtcgtaaatggaccgtattaagcaccgtaatattgattattccctgcgcctggctgggattcgccgtacaaaatcccgccacccctttcggggtatttatgctcatcgctctgttgtgcggttttgcgggggcaaacttcgcgtccagtatgggcaacatcagttttttctttccaaaagccagacaaggtagcgcgttgggtattaacggcggactgggaaatcttggcgtcagtgtgatgcagttgattgcgccgctggttatttttctgccgatatttacttttttaggcgtccagggcgtgccgcaacctgatggctccctgctcgccctcactaacgccgcctggatctgggtgccgttactggctgtcgcgacgcttgccgcctggtttggtatgaacgatatcggcagttcaaaagcgtctgtcgcctcgcaattgccggtgctaaaacgtctgcacctgtggctgcttagcctgctgtacctggcgacattcgggtcattcatcggcttttccgcaggtttcgccatgctcgccaaaacgcaatttcccgacgtaaacattctgcaactggcgttctttggcccctttatcggcgcgctggcgcgatcggcaggcggcgtgatctccgataaattcggcggcgttcgcgtaacgctcattaattttatctttatggcgctgtttaccgccttgctattcctcacgctgccaggctccggcgcaggcagctttagcgcgttctatcttgtttttatgggcctgtttttgacagcgggtctcggcagcggttctaccttccagatgattgcggtgatcttccggcagatcacgctctacaacgtcaaactgcgcggcgggagcgatgagcaggcgcagcgcgaagcggtgacggataccgccgccgcgctcggttttatctccgctattggcgctgtgggcggcttctttattccaaaagcgtttggcacctctttggccttgaccggctcgccggtgggcgccatgaaaatctttttgctgttttacctcgcttgcgtcctgctgacctggctggtctacgggcgtcgtaagcctaaacaacaataacaacatacgcacctgtaggacggccatccggtaatggtttaacgccaaatcgacaggatggcggaaaatttatcgaagcaggagaaatgtcatgagtaaactgttggatcgctttcgttactttaaacaaaaaggcgatacctttgccgacggccatggtcaggtgatgcataccaaccgcgactgggaagacagttatcgccagcgctggcagtttgataagatcgtgcgctcaacccacggcgtcaactgcacgggctcctgtagctggaaaatttatgtcaaaaacggtctggtgacgtgggaaacccagcaaaccgactacccgcgcacgcgtcccgatttaccgaaccatgaaccgcgcggctgcccgcgcggcgccagctactcctggtatctctatagcgccaatcgtctgaaataccctctggtgcgtaagcggctgatagaactgtggcgcgaggctctttcccggcacagcgatccggtgctggcatgggaatctataatgaacgacccgcaaaaatgccaaagttacaaacaggtgcgcggacatggcggctttattcgttcgaactggaaagagctgaatcagctcattgccgccgctaacgtctggacaatcaaaacctatggtccggatcgtgtggcggggttttcacctattccagcaatgtcgatggtttcttacgccgccggaacacgttatctgtcattgcttggcggtacttgtctgagcttctatgactggtattgcgatcttccgcccgcgtcgccaatgacctggggcgagcagactgacgtgccggagtccgccgactggtataactcagcctacattattgcctggggctctaacgtgccgcagacgcgtaccccggacgcccacttctttaccgaagtgcgctacaaaggcaccaagacgatcgccatcaccccggactattccgaagtcgctaaactgtgcgatcagtggctggcgccaaagcaaggtaccgacagcgcgctggcgatggccatgggtcacgttattttaaaagagtttcatctcgataatcccagcgactattttcttaactattgccgccgttataccgacatgccaatgctggtcctgttggatgagcgcgcagacggcagttatgtaccggggcgtatgatgcgcgcgtcggatctggtggatggactgggagaagccaataatccggaatggaaaaccgtcgcgctcaacagtacgggcgaactggtcgcgcccaacggttctatcggttttcgctggggcgaaaagggaaaatggaacctggaaccggtggcggcgggcgtcgaaactgaactgtcgctctctttactcggtcagcatgatgacgtggcgggtgtcgctttcccctattttggcggcaacgaaaacccacattttcgcagcgtgcggcaggaaccggtgctggtacgtcagttaccggtgaaacgcctggctctggcggacggtagcgagcggatggtcgtcagtgtttacgatctggtgctggcgaattatgggctggatcgtggtctggatgacggccatagcgccaataattataacgacgtaaaagcctacacgccggcctggggcgaacagattaccggcgtgccgcgtcgacatatcgaaactattgcgcgtgaatttgccgagaccgcccataaaactcacggtcgttcgatgatcatcctcggcgcgggagtgaatcactggtatcacatggatatgaattaccgtgggatgattaacatgctggtgttctgcggctgtgttggacaaaccggcggcggctgggcgcactatgtcggccaggagaagctgcggccgcaaaccggctggctgccgctggccttcgcgctggactggaatcgcccgccgcgtcagatgaacagtacctcgtttttctacaaccatgccagccagtggcgctatgaaaaactgactgcgcaagagttgctgtcgccgctggccgatccggctaaattttccggacacctgatcgatttcaacgtgcgcgcggaacgtatgggctggctaccctcggcgccgcagcttaatcttaacccgctcagcgtgaaagcgagcgccgataaagccgggctgtctgcggcggattataccgtgcaggcgttgaaatcaggcgctatccgttttgcctgcgaacagcctgacagtggtcataatcacccgcgaaatttatttgtctggcgctctaacctgctcggctcctccgggaaaggtcatgagtacatgctcaaatatctgctgggcacagacagcggtatccagggcgaagcgctgggttccagcgaaggaattaagcctgaagaggtggaatggcagtccaccgcgattgagggcaagctcgatctgttggtcacgcttgatttccgtatgtccagtacctgtctgttttccgatatcgttttgccgaccgccacctggtatgaaaaagacgatatgaatacctcggatatgcatccgtttatccaccccctttccgctgcggtcgatcctgcctgggaatccaaaagcgactgggagatctacaaaggtatcgccagcgtcttttctgaagtgtgtgtcggacacctcggacaggaaaccgatgtggtgctacacccgctccagcatgattccccggcggaactggcgcagccatttgatattctcgactggcgtaaaggcgagtgcgaacttattccgggcaaaaccgcccccaatatcgtcgtggttgaacgcgattatccggccacctatgaacgttttacctcgctgggtcccctgctggataaattaggcaacggcggtaaggggattgcctggaatacgcaagatgaagtcgatttcctcggtaagctcaattacaccaaacacgatggcccggcgaaaggacgtccgcgaatagacaccgcgctggatgcttcggaagtgattcttgccttagcgccggaaactaacggccaggtggcggtgaaagcctggcaggcattgggcgagatgaccgggcgcgagcacacccatctggccatcaataaagaagatgagaaaattcgctttcgtgatatccaggcgcaaccgcgcaaaattatctccagcccgacctggtcaggactggaaagcgagcatgtctcttataacgccggatataccaacgtacatgaactgatcccgtggcgcacgttgtcggggcggcaacaactctatcaggatcatgcgtggatgcgcgcttttggcgaaagcctggtggcatatcgtccgccgattgatacccgcagcgtcagcgaaatgcgagaaattccgcccaacggtttcccggaaaaagcgcttaacttcctgacgccgcaccagaaatggggaattcactccacctacagcgaaaacctgctgatgctgaccttgtcgcgcggcgggccgattgtctggatcagcgaagccgatgcccgtgaattgggtattgaagataacgactggattgaagccttcaacgctaatggcgcccttaccgctcgtgcggtggtcagccagcgcgtcccgccgggtatgaccatgatgtaccacgcccaggagcggattatgaacattccgggttcggaagtgaccgggatgcgcggcgggatccataactccgtgacccgggtctgtccaaaaccgacgcatatgatcggcggctatgcgcaactggcttacggcttcaactattacggaaccgtgggttcgaatcgcgatgaattcatcatgatcaggaagatgaaaaacattaactggctggatgatgagggccgggatcaggtacaggaggcgaaaaaatgaaaatacgctcacaggttgggatggtactgaatctcgataaatgtattggctgtcacacctgctccgtcacctgtaaaaacgtctggaccggacgtgaagggatggaatacgcatggttcaataacgtcgaaactaaaccaggcatcggctatcccaaaaactgggaggaccagcaggagtggcaaggcggttgggttcgtgatgttaatggcaagataaggccccgtctgggcggcaaaatgggggtaattagcaaaattttcgccaacccggtgattccgcaaatcgatgattactatgaaccctttaccttcgattatcagcatttacataatgcgccggagagtaagcatcagcccactgcccgccctcgttcactgatcgacggaaaacggatggacaaggtgatctgggggccaaactgggaagagctgctcggcggcgagtttgaaaaacgcgcccgcgaccgcaacttcgacaacatacaaaaagagatgtacggtcagttcgaaaacaccttcatgatgtacctgccgcgcctgtgcgaacactgcctgaaccccagttgtgtcgccacctgcccaagtggcgctatttataagcgtgaagaagacggcatcgtgctaatcgaccaggataaatgccgaggctggcgtttgtgtatcagcggctgcccgtacaaaaaaatctactttaactggaagagcggcaagtctgagaagtgcatattctgctatccgcgtattgaatccggccagccgaccgtttgctcggaaacctgcgtcgggcgcattcgttatcttggcgttctgctctacgacgccgacaggattgaagaagcggccagtaccgaacacgagacggatttgtatgaacgtcagtgcgatgtgtttctcaatccgcacgatccggcggtcatcgaagaggcgcttaaacaaggcatcccgcaaaacgtcatcgacgccgcccaacggtcgccggtgtacaaaatggcgatggactggaagctggcgcttccgctgcacccggaataccgtaccctgccgatggtctggtacgtaccgccgctatcgcccatccagtcatacgctgacgcgggcgggttgccgcacaatggcaatattctgccggcggtggaaacgctgcgtattccagtccagtacctggccaatatgctcagcgcgggcgataccggcccggtcattcgggcgctaaagcggatgatggcgatgcgccactacatgcgctcgcagacggttgaaggcgtgacggatacccgcgccattgaggaagtcggtctgagcatacaacaggttgaagagatgtatcgctacctggcgattgccaattatgaagatcgttttgtcattcccaccagccaccgggaaatggcgcgcgatgcctttccggagcgcaacggctgcggctttacttttggcgacggttgccacgggtcggataccaaattcaacctgttcaacagtagccgtattgatgccatcaatatcaccgaagtacgtgataaagcggagggggaataatgcaaatcctcaaagcgattggcctgttgatggagtatccggacgacgagttgtgggaatgtcgggatgaagcgctcacccttatccaacacgatgcgccaatgctggccgacttcactcgcgagctgctttatgcgccgttactggataaacaagcagaatggtgtgaagtgtttgaccgcgggcgcgccacttcattgctgttattcgagcatgttcatgcggagtcccgcgatcgcggccaggcgatggtcgatttgttaagccaatatgaaaccgtgggcctgcacctcaactgccgcgaactgccggatcacctgccgctctatctggagtacttaagcgtgttgccggaagcggaagcgcgcgagggattacagaatattgcccctattctggcgctactgggcggtcgcctgaaacagcgaggagcgccgtggtatcaactgtttgacgccctgctgacgctggcgggcagcacgcttacaagtgacagtgtcaccaaacagattattcaggaatcgcgggatgatacccgtcaggcactggatgccgtctgggaagaagaacaggtgaagtttatcgaagataacgccacgacctgtgacagttcaccgttacaccattatcaacgacgctttagccaggacgcggcgccgcagtacgtcgacgtcagcgcgggaggcccgaaatgatacagtacctgaacgtctttttttacgacatctacccctatatttgcgccacggtattcttcctcggcagttggctgcgctatgactacggacaatatacctggcgcgcgtcgtccagccagatgctggacaagcgtgggatggtgatatggtcgaatctgttccatattggcattctggggatcttctttggccatctgtttgggatgctaacgccacactggatgtatgcctggttcctgccgattgcggtaaagcagcagatggcgatgatcctcggcggcgtgtgcggcgtattaacgttgatcggcggcgcgggattactgtggcgtcgtctgaccaatcagcgtgtgcgggcgacatccactacacctgatattatcatcatgagcattttgctgattcagtgcctgcttggcctgagcaccattccgttttcggcgcaatatccggatggcagcgaaatgatgaagttggtgggctgggcgcaaagtattgtcaccttccgcggcgggtcttcggaaatgctgagcggtgtggcgtttgttttccgcgttcatctggtgctgggaatgactattttcctgctcttcccgttcacccgtctggttcatgtctggagcgcgccgtttgagtatttcacccgtcgctaccagattgttcgtacccgccgctaattctctttgcccggggatacgcttaccgggcaaagaaaaacgcctgggcgtcgtcattcggcaacgcacaggctatgatgattcttcagtcaaaggagaacatcaatgaaaccgcagatttaccatgttgacgccttcaccggcgacccctttcgcggcaactctgctggcgttgtcttacatgcggatacgctaagcgacgcgcagatgcagctgattgcccgtgaacttcgtcactcggaaaccgcctttttgctaaaaagcgaagagagtgatgtgcgcatacgctactttacaccgacagtagaagtccccatctgtggtcatgccaccgtggccgcgcattatgttcgggcaacggtactggggttgggaaacaccaccgtctggcaaacctcgttagcgggccgtcatcgcgttgaaattcatgccgaacacaacgactatcgcatcacgctggaacaaggtcagccctcttttgaaccaccgctagtcggagagattcgggctgccatcatcaccgcactgaacctgactgaagatgatatcgtgccgggagcgccaattcaggtggcttcaacaggacatgcaaaagtgatgatcctgctcaaaccagacgttgatattgatgccctttctcctaatctggcagccctgacggcaatcagccagcaaattggctgtaacggcttttttcctttccagattcgtccgggaaaaaacgaaaccgatgggcgaatgttttccccggcgataggaattgtggaagatccggtaacgggaaacgccaatggcccgatgggggcatggctcgtccatcatggcctgatggcgcatgacggtaaaacgctgcagattcaaggccatcaggggcgcgctttaggcaaagagggtactgttgatgttaccgtcaccattcgcgataaccagccggaaaacgtcaccatctccggccaggcggtcattctgtttcatgccgaatgggccattactttttaatctttgtcaggcccgcaaatcctcgcggcaaaaaattattttcccgcctctggatgggtatcaaatgcagccattaccgcggccagctccgcctcggtaaaaccgtgctttacatcatttacgccgagaccaaactgctgctgaagtaactgatacaacgacggtacatccggtacattgacctgttcaacggcatgtccctggtggtaacgcgtgaagtggaaattcgttaatgtcagcttgccgccatcaggcaaatggcggcacatcaacaaatgatgacgaaaatgggattgcggccagtgagccgaccagaaattgcccatcacatgatcgctctgctgctgcacccccagatcaaaacagtacatcgactgccagtgctcatggtggcggaattgtaaaatccatgtgcttccctcctgcatcaggcggtattcgccatgcggcgtttgctgggcaatttcagcctgcagacgaagcggtgcggttagcgtttggccgccaaaccccacgtccgcgatccactgctcatcctcaacatcaaccagcagcaaacggtgcgtgcgcggcggtaaactggcgggatgagacagaatgacccgccccaataagcttcggacgttaaaaccgatgtcgcgtaacgcgcgttcaaacaggccattcagttcaaaacagtatccaccgcgtcgggcataaagcagtttctcctctaatgccgtctcatcgagctgtatttcacgaggcagtagcacatccagattttcaaaaggaatcgcgcagttgtgcgctaagtgaagcgttctgagcgcttcaaccgtaggaacccccaacggctgacaatgtaatcgcgtaaaataagcatgtaaaaaagaggtcatctgaggcttccattaacattaatgcttgcgttcggcacacaggctgaggcggatatcgctgcgcaacaggataccctatccgtggaatagcgttggatacttttgaaaaaaataagacaggccggctgtcgcgccggaggtacgtggaattttggcgtacaaacggaaatcgggttctgagaatctctttgcgacacgccgccaaaatagcggcgtgttaaaatttttaacgccggctcagcgagtctgatttctaacaaaactggctaaacataaacgctttttaataattgtccaaatagttatggtagcgagcttttatgtcggccgcccattgcgctttcgcctcctgcatgttgctggcccgagcgatataatattctaaacacggaatggcgcctaatgcctgaggtaaggcattatatgctgccattcgctctctgacggttttatatttttcatcaatatcataatcatagtacgctggcgcttcaaaaaagccctcttccagtctcatacaaatctcttcaaaggtcccctcaacctcaacggtatgttccccatccgatatcctgacgattggcttaccttcagctatcagcgagagttgttcgaatgttaacatccgaccatcagaaagctcgacatctatagtaaacagtccatcacgtacagcatcagcaaggtgattatggatattccctgcattggcacagaactccgcaactttaggcgtaacattacaataatgttcaattactcgcgtaaatccgtaggccagtcctgcggtaagcacatacaagatgcctttcatgatttttgttgataatttattttcataatctcctgcagcaacatgaggtagcttatttcctgataaagctctggcataggtagaaactgatgtatatggcatatcctactccttcaaattttgctcaatagctttatatgtcctactcctctctcattatgacgatatgtcaatcaacaaaattgctcaaaggcatacattttcaggagaaaatgagaataacaggcgcaacggcctgatcttatgctgcttcaatatcgtcaggtggtttatcgttcgaggtcatatctatgaccataaatccctgcagggattaaccctgattaattattgcgcaacgcaatcactgccgatttgtgctggcgtcttatctggctgaatcgtgaccacaccgcaccacatctgaccacacaaataaactcgacatcctcattttgttctttccgtatgttttgcgtcatttaacaattgcaggtaggatgctccgccggcggttttatccctgtcacagaatcagggaaaagcggcattcgccattgcaggcaatcgattggtgagcgcccgtcgcggcataaggaatttttctgtcaggacaggctataacaggtaacgtaatgaaaacacagactacgcacgccgcagaacaacatgcggcgaaacgacgctggctgaacgcccatgaagaggggtatcacaaagcgatggggaatcgtcaggttcagatgattgctatcggcggcgcgattggcaccggtttatttttaggtgcaggcgcccgattgcaaatggccggaccggcactggcgctggtctatctgatatgcggcattttttcttttttcattttacgcgcgctgggcgaactggtattgcatcgcccttccagcgggagcttcgtctcctacgcccgtgaatttttgggtgaaaaagcggcctacgtcgcaggctggatgtactttattaactgggcgatgaccgggatcgtcgatatcaccgcagtggcgttatacatgcactactggggcgcatttggcgacgttccgcaatgggtgttcgcgctcggcgcgttaaccattgtcggtaccatgaacatgatcggcgtaaaatggtttgccgaaatggagttctggttcgcgctgataaaagtactcgccattgttatcttcctggtggtaggcacgatttttctcggtaccggtcaaccgcttgagggtaatgccaccggttttcacctgattacagataatggcggctttttcccgcacggcctgttgcccgcgctggtactgattcagggcgtggtgttcgcttttgcttcgattgaactggtcggtaccgccgctggggagtgcaaagatccacagaagatggtgccaaaagccatcaatagcgtgatctggcgtattggtcttttctatgtaggatcggtcgtattgctggttttgctgctgccgtggaacgcctaccaggcggggcaaagtccgtttgtcaccttcttttctaaacttggcgtgccttatatcggcagtattatgaatatcgtggtgttaaccgccgcgctttccagcctgaactccgggctttactgtacggggagaattttacgttcaatgtcgatggggggttccgcgccgaaattcatggcgaaaatgagccgtcagcatgtgccctatgcgggtattctggcgactctggtggtttacgtggtcggcgtgttcctgaattacctggtcccctcccgcgtgttcgagatcgttcttaattttgcctcgctcggcattatcgcgtcgtgggcgtttatcatggtgtgccagatgcgtttacgccaggcgataaaagaaggcaaagccgcagacgtcagttttaaactgcccggcgcgccttttacctcctggctaacactgctgtttttactaagcgtgctggtactcatggcgtttgactacccgaatggaacttatactatcgcctcgttgccgctgatcgctattctgctggtcgccggctggtttggcgtgcgacgtcgcgtggcggagatccatcgcactgcgccagtgacggcggattcgacagagagtgtcgtattgaaagaagaagcagcgacataacattccccttccccggcagccccaggcctgccgggtttaatgcgcgttgccgccaacaccgcatcgcgcccaatgcttagtcagccttaatcaactgcgccacatcattgctgttaatttcccgctggttgccttcctgatcggtataactggtcatccccgtctctttatctaactgcggcttaccctgagttacgatcgtttgcccattcttcgtcgtcatcacatagttggttgtacaacccgcaagcataaaaaacatcatgcccaaacctgagcatataaataactttttcatattttcctcgtgaatataatgagttaactacagcaaaaaggcagtgtaattctcacagaatcatcaggctatcggcggggtgtaacgaggcgtatcggtgcgtttaaagagatgactggaggggtttccccctccataccctatttacagagcaatgcgaataacatcatccggctgcgtcgcttcctgttcacgtgtcgatttctgcttcacgctgacgtagagcgttttaccgtctgccgatagcgccaggctattcgggtacgtcggcgtatcgaacgttttaacaacgttataggtcttcgcatcgatcacgctgacctgacctgcctgacgatgtgtcacatacgcctcgttacgtgtcgggttaaacaggacggccaaagaagcaggcgccgcgattttggcaagaatattgccattacgggtatcgacaaccagaacctcagtcgccttcgagtcggtgataaacgcgcgatgacctgcggtatcgagactcaggttaataaagaagtgttctttaccgtcatccagcaacttcttacgactgagaattttattgctggcggtatcgatagtgataaattcgccatccgcattggtggtgtacaggcgttgcgctttactgtcgagcgccagacccgtactcattttgccggtattttcgatcgtcgttttcagtttgatggtttcgccatccactacccaaatagcactctctttaccaacaccgctaatgtagatcgtgttggtcgccgcatcggcaaccagctcacggggctgtaacggacgaacctcttcagtacgtttgcgcgcatcaagtaccagacgaccttttacatcacccgttttggcatcaatcgcggtaactgcgctgttaatggtattgccaaaccacagcgtttgggtcgcggcattgatggtggcgccgaacggcttgagatcgttatgaatcgcttgcgtgatttccagcgtcaccgggtcgagacgataaactacgccgcctttatccagtttacggctttgcgatgtagccagccagagcgcgttttcttgctgactccaggccatctcataagcgcctttgcctaccgctttacgcagcatgtcttccgccgccagcgtgctaaatgaggatgcgacgaggagcgaacctaacaataaagaaccacgcaggcgcggcgaaaaaagatgacgtaagtgcatgacgactccctttgataaaaacgtgtatagctgcttcacactacttcgctgcgcgggatcttcgttccgcacttattataagttgagaataataatcattatttatcagaaagtggagcttttcctcgcctgcgaatgtcatggctcttaaataccgcacattttcttaacttaatgtgcgattaaaatttcaaaactttacatattgactacccttaatgtcacgttttccgttgatacgcttacatttatccggcattttcatgaaaattatttccgttagacagcgactttatcccgccctcttattgcctctgaccttctccccggtccttcaggccgccagcgcgcccaatgaacaaaccatgatagtcaccgcaacgccgcaaaccgtatccgagctggatacacctgccgccgttagcgtcattgagggagaagacatgcgtctggcgacgcctcgcgttaatttatctgagtctttaaccagcgtcccgggattgcaggtgcagaaccggcagaactacgcgcaggatctgcaaatctctatccgtggatttggctcgcgttccgcctttggcgtgcgcggcattcgtctgtatgttgatggcattcccgccaccatgccggatggacaaggccagatttcgaatattgatattaacagcatacaagacgttgaagtgttacgcggccccttctcagcgctatacggcaatgcttccggcggcgtaataaatgtcaccaccgaaaccgggagacaaccgcccacccttgaggccagcagctactacggcagttatggaagctggcgctatggactaaaagccacgggcgcgatgggtgacggcacacagccaggcgacgtgtattacacggtatcgactacccgtttcaccacccacggctaccgcgatcacagcggcgcgcgaaaaaatctggctaatgccaaactgggcgtgcgccttgacgatgtcagtaaactctcgctgatttttaatagtgtggacattaaggcggacgatcccggcggacttaccgaatctgaatggaaagccgatccgcaacaggcgccgcgcgctgaacagtacaatacgcgtaaaaccatcaaacaaactcaggcaggattgcgttatgaacgtcagctcagcgcgcaggatgatatcagcgtgatggcctacgccggagagcgggaaaccacgcaataccagtctattcccctggtggcacagctaaaaccagcccaggctggcggcgtaattacactgcaacgccactatcagggcattgattcccgctggactcaccggggagaattaggtgtgccggtcaccttcactggcggagtaaattatgaaaatatgagcgaaaaccgcaagggttacaataatttccgtctcaacaacggcacccctgagttcgggcataaaggcgatttacggcgggatgagcgtaacctgatgtggaatgtcgatccttatctgcaaacccagtggcagcttacgcaaaaactctcgctggatgctggcgtgcgctacagttccgtgtggttcgattctaacgatcactatatcgcgcccggcaatggcgatgacagcggcgacgccagctatcaccactggctacccgccggatcgctaaaatatgcgttaactgacgcctggaatctctatcttgctgccggtcgcggatttgaaactcccactatcaatgagctttcttatcgcgctgacggccaaagcgggttcaactttgacctcaaaccgtcgaccaatgatacggtggaagtcggcagtaaaacgcggattggcaacggcttgttgaccgccgcgttatttcaaaccgataccgatgatgaaattgtcgtcgccagcagtatgggaggacgcactacctacaaaaacgcgggcaaaacgcgccgccagggcgcagaacttgcgttggaccagcgcttcgccggcgactggcgggtgaaagcatcatggacctggctggatgcgacctatcgcagtaacgtttgtcaggggcaaaactgtgatggaaaccggatgcccggcatcgcccgtaatatgggattcgcctcattaggttttatcccggatgaggggtggtacgccggaacagacgttcggtatatgggcgatatcatggccaatgatgaaaataccgccaaagcgccttcgtataccgttgttggactaaatacagggtataaatttaattacagtcagcttaccgtcgatatttttgggcgggtagataatctatttgataaagaatatataggttcggtgatcgttaatgaatctaatggccgatattatgagccagcgccagggcgtaactatggcgtggggattaatctggcatggcaatttgaataaatatccggcaaatatccggcaatagcggggaatccccgctattgataagtcatagtttcatgaaagttacatgaagtactgatttttaatcgtcgctacgttttgttgcaaaacgttctgtaggcagtggcgactggcttctttatcaccagtcactaacgcattaagcaattttctgtacagattaacgccgttttgataatcatcaagtttaaaattatcatataaaaaatgcagacttggccccaggcgtacccataattgctcgatcatggcatacagcgttggcatatccgcgtagtggtagatctcaaagcggaatgcgcggttggccaaaagaattttctccataacgccactttccagcgcctgttgaaattcatctaatagcgcattcagcgtctgctcgcgatccggggtaatcttacccgcagcggcgaccaccgccatctcctccagggcagtacgaatcgtattaatttccagcaaactttccagcgagatctccggcaccataaacgcctgtgctggcgccaccgccaaagcactggaagagaccagccttaacagggcctcacgcaccggcgtaatactgacgcctaactcttgagcgatatttttagtgataagccttgcgcctggttttaatgcgccaatagacaattgatgctttaaccgattttcaacctgtgtggtcaggcttatatgttgtgttttttccgtacccggcattttccttccttcacctcttggcagaacaacatcgcaatcgagtcccgaagaagtttcggaacttaattgtaaaaaagataatccaggcctgaacggccaaataaataaaagtgataatttacttgcgtgatattctcatcttttacaacaatacaggtttctttatggcaaccgttttatctccgtcattccttcatgtatcgagatttttgaccggttcaggccgctgagggagataagctgccccaccgcgatctgaatgatgaatataagtaaagccgcaattttaaaatttgcacatttttatggcgacataatgccgccattttttctttacgcatcgtccgctaaacgtatcacgactttgccaaagttcttccccgccagcagccccataaacgcttctggcgcattttccagcccatcagtaatctgttcccgataatgtattttcccttctttgatccaacgccccatttcttgctgaaactcatgtatccggtgaccatagtcctggttgatgataaaaccttgcagacgaatacgctttttaagtaatgtcgccatcagcagaggcagtctgtctggaccgtccggcaacgctgtcgcattgtagccgctgaccagaccgcagagcggaatccgcgccgacgtattcagtagcggtaagacggcgtcaaagactttaccaccgacattctcataatagatatcgataccctgcgggcaggcctgcgcaagctgttgtgggaaattatcagcgtgatgatcaaggcacagatcaaatcccaaaacgtctgtcgcatgacggcatttttccgcgccgccagcaatacccacgacccggcagcccttcagcttgccaatttgcccaaccgttgcgcctacggggccggtggcggcggcgacaaccagcgtttcgccctctttcggctggccgatatccagtaaccccatataggcggtaaaccccggcattcctaaaatacccaatgaccaggaaggatgttgcggattatcacccagctttaccaacccttcgccatctgaaatgtcataatcctgccaaccattgtaactcaacacccattcgtctggtcggtaatcaggatgattcgacgcgacaacgcgactgaccgtaccgccaaccataacgcagccaggttcaacaggcggcgcataagagggttcatcgctcatgcggccacgcatataagggtcgagtgataaaaaaacggtacgcaatagcacctgcccttcaccgggcgtcgcgacgtcatcttcttcgaggcggaagttatccatctgcggcgcgccgtggggacgcgaggccaaaacccaacgacgatttcggttggtctgttgcttcattctattctcctcatgcctggcataatccatcaataatagtcgaacattagctttctgagggagttaaacactctcagatatcaggctgtgcgcttttatgaacgactttctcccccttctcgctaaatatgaattcttgcgctaattcgttgatttatgccgccttcaatagtatttctaacactatcgtaaacattccctggggttccctatgacgattcgctttgccgataaagcagactgcgccgcgattaccgaaatctataaccatgcggtattacatactgcggccatctggaatgatcggacggtcgatacggataatcgccttgcctggtatgaggcccgtcaattactgggctatccggtgctggtaagcgaagaaaatggcgtggtgactggctatgcatcatttggcgattggcgcagtttcgacggttttcgctataccgtcgagcactcggtttatgttcatccggcgcaccaggggaaaggactggggcgaaagctgctcagcagactgatcgacgaagcccgacgctgcggcaagcatgtgatggtggccggtattgagtcacagaatgccgcctcgatacgcctacatcattcgctgggatttaccgtcaccgcgcaaatgccgcaggtcggcgtaaaatttggccgttggttagatcttacgtttatgcagctccagcttgatgaacacgccgcgccggacgcctgctgatgaaccagtcgctgacgctcatctttttgatcgccgccggtgtcgggctggtggtacaaaacagtattatggtgcgtattacgcagacatcatcgacgattctgatcgctatgctgttgaactcgctggtagggatcgttttatttgtgacgatattgtggtttaagcaaggcgctacgggcttcggcgagctggtcgccagcgttcgctggtggacattgatccccggtctgctggggtcattttttgtatttgccagcattagcgggtatcagaacgttggcgccgcgacgactatcgcggtactggtcgccagccagttaatcggcggactggcgctggatatcgcgcgtagccacggcgtcacgttacgcgcaatggtcgggccggcgtttggcgcgctgttgctggtcattggcgcatggctgattgcgaagcgccagttttaatgggttacaggatcgtgccgcctttggtgagctgctcgcggcgcgcgtcccgatcttcttgatattgcctgccgtgatgcgcgatagccgtgcgtaaacgctgctgctgcacataacgatcttcgcgacgtaattcagcgtcatcgctcaaggcaatcagcaattcattcatatgggcaattacgctctccgcgatggcggcatccacgcgggcgctcacttcctccaggtgcgacataagctctcctactctttattctgtaacagcatgattcgcctattatacgcgttattgtcgcccgatgcggtaattcgccgccgccaccctgatttaacttacgtcaagtggaaacacggggcttaatagaccgagaattcgcgcctttttgcctttcttccgccgtttgcttgcgtatagaccccgtaaagtagacgcgtgaagaagtctaagggataacaacgtggcaaaatctctcttgcgcagcggcaatctggatgattatcaggccgtgggcggcggcggtcaggccgtatttgaatcagcattgcaaattcgcgaaacgcttcgtctgcgtaaacagcaggcgatggttgactgtctggcgattccgcaacttaacgataatggcgatcgggttgactggtattcgccgattgaaggtcaggcgatagcgtggaaagcggctgacgaagagacacgttctcgggctttacgttatttagccagcacttttgaaagcgcggctgcactcagtcgcaaaagtctgcaatccggtaaaacagcgctccagctatttggttcgctacttgagaaagcgacgcaatttcccggtgaaaatcatgttttcctggttaacggcaaaccggttatcaccttctggggattcgttaatctcaacgaaaatacacgcgatgatgtgctggactgcctgcgggtaaccgaggcaatccccgacatccctctggtcgagccggagcccgaagaaaagccgctggtagaggcggcatttagtcaggcggatgaacctttgttaacgtctgtcattgagccgccgaaaatgccggaggaacctgctgcgccgcccgttatcgttagcgagccgaagcctgccgcacctatcccggttgctgaggcgaaaagagctcgtcgtctaccgctgtggagcttacctgtcgctgccgtggttatcgccgccgtcgccacgccttttttctggccatcttcatccgttgacggggcctctcctgttcgcgccgcgcctgtcgctaccgcgaaaactgacgttacccccttgcctgaactcaccgcgcatttgccgctgcatcgcgctgaggtgacgcccgcccccaaagcggcgccgttgccggaagcgcctgttatcattgccgctatccccaaagacgcgctggtgatggacaatacgcagatgaagcttggaaccacgcgctttttaaacggtagctggcgcatcagtgtggatgtcaaagatccgattaccggcaagccgccctctctgcgttatcagatccaaaataacaaaggcatcgcgcgcgtagtacatggcgataacgtggtttgtcgggcggaaattttctctggtctgcatcaaacgggcgagctgatgattaaaagtcgcggcaatgcgcgctgcaccgacggttcacgttatccgatgccggaaattacctgtaaagcaggcgtcaatgacgtcgcaacctgtaccgcccgttatggcgaccacgcggcaattccgttgacgtttaaaaagataggtgcctgattttatgttggtcaatctgtgtgattacaaacagagcgtcacgctcattgcaaacagcggcgtccagtttcttgattttggcttaacgccgcaagagtcggcccactacggacgttttgtgcgcaaaacggcaaacggcccgctactgcgcctcgattttgatctgaccagcgggcgctacacgttgccaggacgtgctggcggccaacccgaagtcgtgaaaccggaaagcactcagacgctgcactattctctggatgtactcgacggaatctggctccccctgccgttcctgcgttttaatccgccgcgtacctttattgacgggccggataactgggcgcgcattcaggtacgtaaactcagcgagccagatagcgccggaaacacacaccgcatcaccctcgccttcgacagtcagctggcaaaaaatatgcctgcggcgttggcgccttgcgaaaacgatctgctcaatggcacacgttttgcgctcgcctggcgcgatgaagaagttgccgattttcttgaccagacatggattgacggctggctgcgcgagtcgtttcttcagtatgcctcacaggtggaaaaccgttcggaacaggccattcagcaagcgctgcgtagttttgagtatcaggcgcactggttgaatttactgacgctgttaggcgaacagcttacggtgccggaagtgaagtttgtgacacatacgttaagcacgcccgcaatcccggtcgatctgattctggatgtcggcaatacgcatacctgcggcgtcttgatcgaggatcatggcgatgcgaatgacgggttacgccagacggcagagcttcaggtgcgttctttaagcgagccgcagtatctgaacgatcctttatttaccagccgggtagaattctcggaagcacgctttggcaagcaacacttttctgtcgaaagcggacgagacgacgcctttgtctggccttccattgtgcgtgtgggcgacgaggctcgcgcccttgctatgcagcgtgtgggcaccgaaggcagcagcggtatctccagcccacgtcgctacctgtgggatgaaacccccgccttgcaggactggcgttttagccagatccacggtaaaacgcagcgcgaaccgcttgccaccgcgtttccgctgatgaatctgatgaacgatgacggacagccgttattccgcctgccgtatgaagaaaggctaccggttttttcgccgcaatacagccgtagcaccttgatgacgcatatgttgtgcgaaattctggctcaggcgctggggcaaattaacagcgtcgccacccggctgcggctcggctttcccgcctcgccgcgccagctacgcaccctgattttaacgctgccttccgccatgccgaaacaggagcgagaaattttccgccagcgaatgtttgaagcgctggcgctggtctggaaagccatgggctggcatccgcaggatgaggatttcaccacgcctaagcagcgtgaaaaaagcgtggtgccggtaccagaaatacagatggaatgggacgaagcaagttgcggccaactggtatggctttataacgaagccatttcgcattacgccgggcgtaccgaatccttttttaatgcgctggccagaccggatcgccagcctgaacccggcgtcgtccccgggcgcgcgttgcgcgtggcatcgattgatatcggcggcggcacgacggatatggcgatcgttcactatcagttagatgacggcgtgggggccaatgtaaaaattacgcctcatctcctgtttcgcgaaggttttaaagtcgccggggacgatctgctattagatatcattcagcgttgcgtactcccttccctgcaaacggcgttgcaacgggcaggcgttacggatgccgccgccctgctggcgaccttatttggcgattcgggacgaattgatactcaggccattttgcgccagcaaacggcgctgcaattatttatgccgctgggccatgcggtactttccgcctgggagcaaagcgacattaacgatccgtttgccggtttacatgcgacatttggcgatctgctgatccgccgcccaacgagcaacgtgatgaactatatccagcaggcgatcgatcatgccttaccgtctggttcgccgacatttgatatattcaatgtgccgttgcaaatccagtttagccagcttcaggagtctctgctggccggtcagtttacgctgacaacgccgcttcatgcggtctgcgaagcgatatcccactatcactgcgatatcttgctggtgacggggagaccgacctgtttacccggcgtacaggcgctcatccggcacttacaaccggtgccggttaatcgcattgtgtggatggataagtatcaggtacatgaatggtatcccttcagtcaacaagggcgtatcggtaatccaaaatccactgccgcggtgggcgcgatgttatgcagcctggcgctggacttacgtctgccgcgtttcaattttaaagcggctgatatcggcgcgtattcgactgtacgttatctcggcgtactggataataccgttaatacccttcgcgatgaaaacatctggtatcacgaaatcgatttggataaacccggcgcaacgctggacgctcgcttgcattttccgctacgcggtaacgtgacgttgggctttcgtcaactggcgaacagtcgctggccagcaacaccactttattgcctgagcattaattccgccgaactggcgaaaaccatcgctggcgacggcgtactgaatgtgcgactgaaattacgcggcagtagcaaagatagcgccccggaatcgttcatattaagtgatgcctggctccaggacgggacgccggtcgccgccgatgcgctgacattaaaattgaatacgctggctgaccgtcgccacagcggcagccactactggatagatagtgggagtgtatacctgaaatgacaaaaccgttaaacaccacccaggctgttatcgagtgggttaacaacacgcgccgttacgcaacgcgactggatgacgaagccgacgctctgctggcgcaacttacgcttgccgcggcggatgagtcagcgctcaacgccgcctgcgcatcacatggctgcgttggtctgtacgggtatgcgcaatccgcaaaagcgcatctgttaacgacgctatgcggtaacgagaatggcaagctggaaattatcacgccggaccgtgactatgattatttcagccacatcaatccgggtcatgcgccagcgaatatggctattcgctttacgcgcgacattttttcaaacgagagcggctggccgttgcgcctgcgcttgatcagtgaagccgaactggtgcagatctttattgcctggaccagctcgtcccccgtttgtcgccaggtcgaaaaatccattatcacatcacgcctggagaaatggcaatcgcttcgccaaccgcagcccgtccccggcgttaccgctgaagaggtagcgaccatcgcgagtttctggcgctcttgcctgccgtccgccagacaacatattgatgatgcgacatggcaacactttgcctcgctcttgcctgcgctggatctcacgacacgggcgcacgcctgggcattactgtggggagagcaaccggagatcacccagcaatggctggcgctggcgcatatgttgcaacaaaccggccatgccggggaactggcggcgccgctcagcctgctggtcgatcattttggcttaccggcggaaaacttcctgacgcaaatggcgctaaccgccaacgatacgcaaagcgatgtggtggtgcatccggttaaggaaggccgactgctcaatgcggtcagcctttcgcttgattctctggcgctgcttacccgcgaactggtgctaagcgttgaaaacaacgtactggataacgtagatttactggatattccggtcgcgccagacagtcatcctcatccgttatggcgggcgaaattaggttggatgctggcccattaccgccaacaggtacagcccgatgttctggtgatttgcaatgctctggcatctcgctcgcaaacgtccactgccgcccatcacttactggagtgggttaacgccacgcagccgcagcatgaatcagcgttacccggcgtcgtctgggctattactccacaggatgcccgttttgccacccagcaaaatctggatgaagccgtccagcagttgatgggtaaacctggcgtgcattggggaacgttgcaggcgctggataaacacagtatgcagcgtttggtggaatggttatcgcaggcgacatcggcaccacagcgacaggcgcgcttacaggcgttacgcgaacaactgcgaggccgcgtgcgcgatctgttaccgatgtttgatgacgcgcggctaccggttgaaaccgtgatccggcgtcttcaggcccaggccgccagacatggcgacctgctggccgggctgttaccgccggtacagaacttcgaagcgttgctgagcacccgacagtcacgagaagaacaggtctgcggtttatttaatgacgcgatcgatctctttgccgacgaaccaacgcgcgcttcagcgtcagaaggtcacgaaacaggctaccaggcgcacaaaatgtggatcaatcatctgcgccagtgggcccactgccgggataatgcgcagcgtctgggactggaaccgcagatgctcaacgccgtggcggagattttaattaccgccagctatcgcctcggtttacctcagcagttacagaaaaccatgcagcgcgaggaggtgagcggcgcgcagcttcatgccatcattggtaacttcatcgcctggctcggctacgccaatatcgaggaggcccaacgcccggccagccgcgttcagaaaggcgcagccattttcgccgcaacaccgcgttcgacaatgttgcgtctaacaaagcttgacgaacagcccgttcatgccgccagccgctatgtctatgactggcttgttgcgctgtataccctggccaatgagaacgcaggatatcggcatccgcaggacgttaccgacgtagacagagcgcaattaattgccctgatagcctgacctggcggaaaaaccatgcccggtaacctgtatcgggcttgaggtcagaaaagcgaaaacagcaatgcgacggggaaacttatcggccatgtcgcgccaaccaaaaaggcgctcaggaaacgaattcgttttttgtcatgagtcaaaaaccaggtgatcagggatgatatcaccgccatgacggcgtaaaaaattaatatcttttgaaagagggtcatatcaggcatccacgccaaccagaggaaaaaacgcgcgcaatatgctctttttatttgacgcacatcaaggtttatcagccttaacagcaaaacgttctcaatgcacggctccgctcacagaatatcctgtttaggtattattgcggatctcgccaacccgtactatacccataggggttatgatgaaaggtggcgaaaatgaatgtttccagtaaaaccgtcgtgctgattaatgtctttgctgctgcaggacttttgggtctgatctcgttgagattcggctggtttgcttgaggtgttcaacctttgagtacttgctgcgcatgttggcggggaggtccccctctccgccgacacccgcctattttttcacgatttttctgaacagtaaatgatccttaatgcttaaccatgatgtggcggacaagggtgtagtcttccagaccatacaatgacatatctttgccgtatcccgactgtttttgccctccatgcggcatttcgctaaccaacatgaaatgggtattaatccaggtacagccatactgcaatctggcgctaagccggtgcgcccgcccgacgtcctgagtccagacggaggatgccagaccatagcgagaatcgttggcccacctcagaacctgatcttcatcatcaaagacggttatactgaccaccgggccgaagacctcgcgttgcacgatggcatcttcctgttttgcgtctgccagcaacgtcggagcgaaatagtaacctttaccttccgtttgacttccgccagtaatcacacggatatggctgagggccttcgcctcctctacagccgctgtgacgcgcttcaggtgcgccagcgaacttaacggccccagctctgtcgactcatcctccggcgcgcccattttcaggctgctcactgcgttccctagcttttcgaccagcgcatcatagataccgcgctgcgcgtatatacggcacgccgcagtacaatcctgtccggcattatagaaaccaaaagtccggacgccctgcgccaccgcatccagatcggcgtcatcaaaaacaatcaccggggctttaccaccgagttccatatgcgtacgttttatcgctggcgcagtatggcgcagaatatgctccccggtcgcgatagaaccggttaaagagaccatgcgtactttttcatggccggtcaatacatcgccaacagtttgccctcgtccgaacaggacattgagcacccccggcggaaagatatccttcgccagcacggcaagtttaagcgccgtcagcggcgtgatttcagaaggcttaatcaccacgcagttacctgccgccagcgctggcgccagcttccaggccgccatcatgagcggataattccacggcgcgatagaggcaaccacgccaatcggatcccggcggatcatcgacgtatgtccttccagatattcgcccgccgccagcccactcaaacaacgggccgcgccggcaaaaaagcgaaagacatccacgattgccggaatttcatcattaattacgcagtgcaaaggcttaccgcagttttgcgattcaagccgggcgaactcaagggcgttttgctcgatgctgtccgccagttttaacagacattccgcccgtgctttgggtgtggtctgcccccattcggcaaacgcgttatcggcggcctgcactgcggcgtcaacctgcgcgggcgacgcttccgcaatctcaagtatgacctcgcctgtcgccgggttataaacagactgcctttctccctcgccgtccaccagcacgccattaatcagtaattgatattgcatagcattttcccatatcgtcattaatcgatttccggcgaacgggccgccgctttcctaaaaatagacggcgcgccagatgctcacccggcacactcgggaaatttagtcaggttgtgagctgacacgcattccacctcacacaaggcttttagcgctcagcatctcgcgaatcaggctgccaagctgttttacggcctgttcttcccgttctccccaatgccatgcggtgttaaaacgaaagaaacgcgtccaggcgccggacgttgaaaacattttccccggcgcgatactgataaggtgttcaagcgctttggcgctaagttcaccggcatcaagctgctcaggtagctccagccaaagaaaataaccgctatcgttatggtgaatttttacttccgccgggagatggcgcaaaagggtttgccaggcttgctgtttacgttcggcaagctgccttcgcaatcgtcgcagatgcgcgtcatatcgacgtgtcgagagataatccactaacgccaattgcatgggggaactggtggataatgtgctcattaactgcaaacgctgaatttgtctggcatggcttcctcccgcaacccagccaatgcgaaaaccgggaaccagacatttggaaaaagacgaacaatgcaacacggtatcgtcgcgatcccatgctttggcaggcagaggtttctcgcggccaaagtagagttcgctataaacatcgtcttcaattagcgtcacgttatggtgcgtgagtaacgcaaccagccgcgcttttttctcagcactcagcgtgaaccctaacggattctggctgttggtcattaaccagcacgctttcaccggatattcctgtaacgcctgttccagcgccataagatcgataccttctttaacatcggtaggtatcgacaacgctttcaggcgcaatcgctccagggcctgtagcgcaccgtagaaacaggggttctccaccaccacccagtctcccggcgccgtcaccgcctgtaaactaagattcaacgcttccagcgcgccggcggtaatgacaatctcgtcaggagaaacggtaatcccctgctgcgcgtaacggcgtgctatcgcatagcgcaattctgcattacctggcggcaagttttcgatgacgctcattgccgtcgcggttttgctgacctgcgccagagagcggttcaattgcggcaagggaaacagacgcggatcgggaaacgctgaggcaaagggcaccacagaggtatcacggctcgcctgcagcatctcaaaaatataggtattgatatctacggcttcatcccgaataacgtgcgctgccgtcgcgactgaccgacaaaccggatgcggcgcgacataataaccagattgcggacgggcgataatccgtccctgactttccagcaactggtacgcatgaccgacagtcataaaactcatgccgctactggcgacctgctccctcagcgagggtaatcgatcgccgggttgccaaacgccagaggcgatttgttctctaatttgctccgccagacgttgatattttttcattattcgatctcattgagcgctgcttgcaggtggcaaccgcagtgtatatcagttgttaaaattaacaatgatttgctaactgttatggtgctttccaacaggcgtaatgattagatttcgcaacaaaacgccgtttcagggtctctgcttaacgggaaagtcaaaccaagtgttcgggtatggttcatgagtaagagagaagtgccaccattcagtatccagtggcgtaaaacccgcatcacgcatcaatgtttgtaataacaacctatttgcgcgttgctgagcggtaagtatgacattatcgggatgggataacggactaaaacagtcaaagccggtaccaaaatccagactattatctggcgagcgttgcgccgcggacgcagtacaattcaccagtggtcgtccgggatcgtatattggtattttactgtcaagtggaacaatcgttagatcaagcgtacttccccgactgtggccggatctggcggcaagataaccttcctcaaacagacgatttttctctacctgcggataaaattcgtttttcatttggttttgagaaggatctttggcccacgcgataaagtcgttcactgcgctttgcggacggtagcaatcatatatttttaaggtaagtccgaaggggcgtaaacgatcggcgacctgcttcactgcgttcgcggctggtcgtgttaacaggcaaacaggcgcgttatagcctttaatggggcgaccaataaagttatgggaactgaagtatcgcatgtctacctgtacgtcgggggcgaccgtagtaatatcgacaaagtcttttggctggtggagatcaatatggttttcagctgacattgcctgaacggacaacaggctgaacaggaggaaagaagatacgcattttaccatatgttacacctcgcgagagtcacaggggtgattatgtatttgagcaggtaaagattagcggacaccgcttaaacagatggttaaaataaacatctttccccctgtaatctgtgccttatcacaaacggagagtttatattttgcttatacgaccactgcgcctcctgttctatacccaaaataattcgagttgcgtaaaggcggcaagggagtgagtctcaggagcacagataacgatgtgttttcacaaaggcgagtctacctgaccagaaaggtcatttgataatcagtagtacagttgttgtcgccttccataactaaataacattgtttcgccaaagataagaccactatatagtcaggaaggcaattagtgaggaacacgtcgattgtcggcgataatgcactgaaattacgattcactgcagttgtgcaaacacatagaatccccctcgaaccgagataattcggtctgctggtcatagccattattcagtaagaccgcaggttgcagcggcggatcacgggcgtgaagaaacatcctgtgccccaaattttttggacaagcgctgaacctgccgtatacttttacttaacgtacactccgccataaaaataaaccctgcgatgataccgtaatgccataggcataacttaaggatatgccataaatcaagcgaagcatgatttaacttctcagtaattgcgatagtctgtacaaatattatgggatgaaataataagatgcctaacaaaaatatccctgccacgatcatggcaagtaactgaaaaaaagcccatccgataacgaaacggtaaagtaacagcaataatagccgtccacatttccttagccattctgactgcaaaatgccccaggatgctgtcttttcgtgaatttcaccatctgatttcttcattttgagcctcctcgcaggtttttataattttatcgcccaactggaaacaaagccgtcagctaatcgttacaacaaatataattaagacaaaaactaaagagtaagatatttatatcataagcactatcagtattggccttctgccctaccgctaaacatctcattgttgttagcctaataatacttttagtttaacttcttataagacaatttctacacggttgagcaactatttactttctctaaaaataatatagtgcgtaattaatcattactcatagtacatgatgatgtgagaattaagaaaaccgttttactttcattcgttttatctgacatatttcatggccaggaggcgtgggcatgactaaagctacgggtcgatttgaacaattgaacaataatgttgacggttcaggacaaagcaaaaatcaggtgtttcaccgataggcaaaccgatgggcaacatgggataatatttcgaataccacctattccagtaatgaagtatcatataatcacttgtggtctacattatgccaattactatcgggagaggatttttaaagagtgagatgttttctcaaagtgctatctctcaacgctctttctttacgttactatgggaaaagattaaagattttttttgtgacacgcaaagatccactgccgatcaatatataaaggaattatgtgatgttgcctctccgcctgacgcgcaacgtttatttgatttattttgcaagttatatgaattatcatcaccgtcatgcagaggaaatttccattttcagcactataaagatgctgagtgtcagtatacaaatctctgtattaaagatggcgaagatattccgttatgtattatgatacgtcaggatcactactattatgagataatgaatagaacagtgctctgtgttgatactcagtctgcccacctgaaaagatattctgatattaatataaaagctagcacttatgtttgtgaaccgctatgttgcttgttccctgagcggttacaactctcgctatccggcggtataacattttccgttgacctaaaaaatatagaagagacgcttatcgccatggcagaaaagggtaatttatgtgactggaaggaacaggaaagaaaagccgccatctcctccaggattaatctgggcatcgcccaggcaggtgtaacagctattgacgacgctatcaaaaacaaaatagccgcaaaggttattgagaatactaacttaaagaatgcagcgtttgaaccaaattatgcacaaagctcagttactcaaattgtttattcatgtttgtttaagaatgagatactaatgaatatgctggaagaaagttcctctcatggcctgctatgtttaaacgagcttactgaatatgtagcgctacaagttcataacagccttttttctgaagatttatcttcactcgttgaaacaacaaaaaatgaggctcatcaccagagttgatcacaccataaatagtatggatttacaatcccctggcaataccaaaaccatctaatacaataactttaaatatatactcccagggaataatggatttactatggaacgaattggctcgttatttttataattgacatactgagtataagtatattttctcatacaacttatcgcacttattgacaaaccgttttcgctaatttgaagtgtggaataataactcaaagaaattattggcatcatagcctcacgacgtaactggaaggtggcatgatgcttacaaaaacgttatcagtagttttactgacctgtgcgctgttttcaggccagttactggcgaaacagcaagaccacgcattcgtatggtttgcgacgggagggcaccagcttagacacgaagccgacagcgatgaattacgggcggcagcggaagaatccgcggaaggcttgcgcgagcaccacaactggcagaaatcgcgcaaaccagaaagctattttcgttaattaaacgcccctgcgcttcggcagcgttttcatcagcgcttcagggctcactgaagcgacaacgctgccgggctggggcatttttaagatgtggtttttaattttgccaatgacatgcatttcgcaagggcggcagtcgaattttagcgtcagtacctcatcgccatgcaccaactgcatcggcgtggctttccagctcttaatatttcctttcgcctgctttggacaaaggttgaacgcaaaacgcaggcagtgtttggtgatcatgaccggtacctcgcccttctcctgatgcgcctcataggccgcatcaatcaattgtacgccgtaacggtgataaaattcccgcgctttgtggttgtagacattagcgagaaagctgagatgcgtttgcgggtagaccggcgcaggctgcgccacgggtttccgacgacctcgttgataatgggccagccgcgccgcgtcaagcatatcaatcgcctcccgacggaactgattgagcaggctatttggcacgaacaacgccgccggtaatgtcacctgcatatcacgcgcgtagtaaggcgtctgtcccagcttcgccagtccggcttttaggttattcaacgctttttcagagttgttggcttcctcaaataccccatcaagcgtatgcgtgatgcagacaccgtcttcactggtcagcgtcagaataagctgttcctgccagccgcccagcatgatatcaaccgccacacggcgctcactggaggtttttgtcagcgcttgctgccagttatgatccagattacgattcaacggatgatgcggacggactttatgcaggtcggcaggcatatcatttggccaaacgcggtagcggttatgaccggttttctccaccgtattggcgcgaaaacctaccacttcacgcttaatcaacacgttcagaccatcgccattcgccaacggctccgtagcttctacgtcgagataatccttcgccacattcagcacctcacctaccggcaagccaataaattttggtgaatcaaatgcgccaatatcacctttacgcgcgttaacaaaatagtcggtgctgccgcgatggaaggttttctccgtggagggaacaaaaaagtgttcggtccgaccaaccgacgcacgcgccagatcgccacgttgctcgataatcgcgtccagcatctgacgataatgcgcggtgatgtttttgacatagctcatgtctttatagcgcccttcaatcttgaaggaacgtacgcctgcatcgatcaacgcgccgaggttagccgtttggtcgttatctttcatcgatagcaaatgtttttcgtaagagaccacccgcccctgatcgtcttttaacgtatacggtaaacgacaggcctgcgaacagtcgccccgattggcgctgcgcccggtttgcgcatgagagatataacactgcccagaataagcgacacacagcgcgccatgaatgaagaactcaattgtggcgtcagtagcctgatgaatagccgctatctgactcaaattaagttcgcgcgccagtacaatctgtgaaaaaccgacatcggcaagaaacttcgctttttccacgctgcgaatatcacactgtgtactggcgtgaagctcaatcggcgggatatccagttccagaatgcccatatcctgcacaatcagcgcatccaccccggtgttgtacaaatcggtgattaaccgctgcgcgggctccagctcatcatcatgcagaatagtattcagcgtgacaaaaatcctggcgccgtaacggtgagcaaacggaaccagatcggcgatatcgcgcagactgttactggcgttatgacgtgcgccaaaaccgggtccgccgatgtagacggcatctgcgccatgcaaaatcgcttcgcgagcaattgcggcgtcacgggccggacttaacaattcgagatagtgaggttgctggcgcatacagtcgttcttatccaatagaagcgaaatggcggctattgtagtcagaagcgcaaactaacgaaatagttttcccgcttaatcacgtgggtaatggatcagcgagtgaaaatgaaccgtctggtcactgctgttgcgataggtatgcgccgtatcgccggcaaaacgcaaacctttaccggcgtctatggtttgccataccccaccagtacacatgtccagccgaccctgaatcaccaccacatgttcgataacgccggctttatgcggcgttgattcgctgaccgtgccaggcgccagcaatagggaaaaatagtcaaaacagagttcaggatcccatggaaacaacggtgtgattaccatcgcttgctgctggggatcgaaggtcggaggaaattcggcctgcggcggcgaaataaacactgagaatggaacgttcaggcccgtcgcaattttccacagcgttgcgactgtcggactggattcattacgctctatctgccccaacatggcttttgagacgccggagatctccgccagacgcgataaactccagcctcgctgatggcgtaacgttcttaacgtggtcgccagatagtgtgtcaggttatccattttcccccctgtaaggccatagcgtatcacttgtacgctataacgcacaatgctacattgactgaccgttataacgcacaagaggcgatcatgcgtctgttatcactgccgttacctactgtattatctggtctggtcgccgttctggtcggctatgcgagttccgccgccattatctggcaggcggcgcttgccgctggcgcaacacccgcagagatcgccggctggatgaccgccctcggtatagccatgggcataagcacactaacgttaaccttgtggtatcgtgcgccggttttaaccgcctggtcaacgcctggcgccgctctgttggtaacagggcttcagggattatcgttgccagacgccgtgggcatattcattgtcgccaatgccctgattgtgctgtgcggcgtcacgggattgtttgcgcgtttgatgcggataatcccccattctcttgccgccgcaatgctggcgggaatactgctacgcttcggcctgcaggcgttcgggacgctcaacggagagtttgtcatgtgcggcggtatgctattggcgtggctactctttaaagtattcgcgccccgctatgccgttattgctgccatggtaatgggaataacggtggcgctcatccagggtaaggtggcgatgagcggtattcatttcgcgccggtgtggcccaccttcgttcccccccacttttcattcgctcaaagcctgagcgtcgcggtaccgctcttcctggtgacgatggcatcgcaaaacgcccccggcgtcgccacaatgaaggcgtctggctatcagcttcctgtctctccgttaatgatttttaccgggttgctggcgctgctgctttcgccatttggcgtttattctatctgcattgccgccattacagccgccatttgtcaaagcccggacgcgcaccccgatccaacgcgtcgctggttagcggccgccgccgcaggcgttttttatttacttgccgggtggtttggcggttcgataaccgcgctgatggtcgccctgccggttagctgggtgcaaatgctggctggtctggcactgttaagtacgattagcggtagcctgtatcaggcgcttactcacgaaagtgagcgtgacgcggcagttatcgcatttctcgtcaccgccagcgggctaacgctgatgggcatcggatcggcattctgggggttgatcgctggcggaataggctacgcagtattaacgagaacgcgccgcccatcgttgtctggctgatggtggccgctaatctgccggggtttgcgccatcttgcgatggcgccgcagaattattttttattaacgtcaaacatagaggtatccgtcgccatatcatccacgacctgtttcaacgtctcaaacgccattggcgtactggaattgctcaggtctttaccttcaccctggcgtactaccttgacgaccggcttgttggtcgcggcatctatcagctcaccttcaaaatagaggtgggtatccatggtccggtggcccgtcgccatttgcgtgcccgccacaatcagcgctacagggatcacctcatagaattgcagcccttctttgctggtatccacgcccgtaatcgccccgcggaaaatcaaactgcgcggccctggcgtcgtgaccagcggtttgcgctgttcaattgctgattttactttagtgttcgtataagccagcagtttatcaagaacttgctgcccgacctgggtcgttggtttggggacgggatagtatgttatcggattgtaaacaatactgtcatagttagagtcattgaaatgtggatctacccagcgcaacaccggtttccccgtggcggaggtagtttcctgcaggtccgaataattttttaagaatccagaatacttatccggctgtgtgactttagacgcacagccggataacgccagcaagccagtaagcactgcaactttaaataaagtatgagtacgcatgaaacgatccctttagtcttcgcaatgatgcaaaggaaataatagcaaaacgaaatcattctggatgcactaaaaatggtaacgacagcacaatttgaacgcggcgcccgacaaaaaaatgccgaacgcagcgagacttacagaacttgcatcgctcaggccgtttttctcgccagcatcgtagcaaagcgcagtttgatacggttgccattttcgtccgtgcggtgaagctcgccgacatcttcgttgtatttcagcatgtcccatccttcgtaatagcggcgtaattcgccttctttaaaagcgaacgggaatcccaccgtacagggaaagtccggcgtatccattgccgcaacaatcaaattatacccgccgggttttgtgcagcgttgcatattggcaattaaaccgggaatggtttgcgcctcaagaaacatcataaccaccgtcgagagaataaaatcgtattcgccgtcaaaggtcaatgtattcagatcgacaaggtcggtttgcagattatccagcccttctgccgctttaatacgctcaaggttagccatactggccggatttttatcccacgcggtaacgtcataaccgttcgcggccagatacagactattacggccattgccacatcctaaatccagcgttcggcctggcgcgacaacctttgccgccgccagcacatccgaatgcgtgcgggttaaaccgtatttctcagtaaagtaattttcgtcacgaacggtcatttttttcctccgttttcaacagtgcagcgcgctcagtgcgaataagcaacgtcccctgcaccagcaatagaaatgtacgaaccagcaataaagcgataatagcgttagtgaaaataaacagcgggacggccagaatatggaaaagccctgattcactaccgtgaccaagatgtaaccccgtggtcgccagcgcggaaacgccgaacgaaaaactccagaaggaagcattaaacggttgtgataaataccagggcattaatcgcagcataaataaaagctgtaacagaccgtagccgaatagcattttcgccagcgtgtcgccctccccgccattgacgctcagccaggcgctacaggcgaccagcgcgggcgccagttggatacccagcgacgtacgcagcaccgccggtaattcgccgcagctacgcagtcgctgcaaaataaccggctccagacttaaccacgaaaagacgcctgcgcctaaaaacaccagtccggcatcattgtaaccgagcgctccacaggccatagcgctgataaaattattcgctaccgtgggcagataaagtcctggggttgtcgcttcttccggatgcgctccgcgccaaagtcccgccgtctgccaggcggcatacgccagttgtatgacgacccccacgctgaatagcgcaacggccaacgggcgataccagggaacgaaaccgatcgcgaccagcatcgtggtggcgggaaacaggctgacaaaactgctcattaccggatgtcgcacttcagccatcacgctatggggaaagcgcaccagacggctaaggaacgccagggtcaagagtgcccaaataatcatcgccaggatcaccatgatgtcgccgggccagtggcttattccccatatctggctggcataacgccaggcgaatcccataccgatagtgccaaggacgatgccaaaatagcccgcaggcagattgagcacgcgatcgctctgcttgtgattacgcattttgtttaatttataaagtatatttgaaatgcattttatggaatttctggttgtttcgccagtacctttgctacggttatcttaatcgttcacacggaatttccctatgaccaaatatcgactgagtgaagaacctcgtgcttttacttatcaggtagacggtgagaagaaaagcgtcttattacgacaagttattgccgtaacggattttaacgatgttaaagccggaacctccggcggctgggttgatgccggtaatgtgctgtcacaacagggggattgctggatttatgatgaaaacgcgatggcctttgcgggcacggaaattacgggtaacgcgcgtatcacgcagccgtgctcgctctacaataacgtgcgaataggcgataacgtctggattgatcgctctgatatcagcgatggcgcgcggataagtgacaacgtcaccattcagtcctcttccgtgcgcggagagtgtgcgatttatggcgatgcccgcgtgttaaaccagtcagaaattctcgccgttcagggactaacgcatgaacatgcgcagattttacaaatttacgatcgcgccaccgtgaaccattcgcggattgtccatcaggtacagctttatggcgacgccactatcactctcgcttttattgagcaccgggcggaggtctttgatttcgcgctcatcgaaggcaacaaagacaataatgtctggatctgtgactgcgccaaagtctatggccatgcgcgggttatcgccggcacagaggaagatgctatccctacccttcgctacagctcgcaggtagcggaacatgcgttaatcgaaggcaactgtgtgttaaaacatcatgtgctggtaggcggacatgctgagatacgcggaggcccgattttactggacgaccgcgtgctgattgaaggccaggcctgtatacagggcgaaattctgattgagcaccaggtcgagattagcggacgggcgacggttatagcctttgacggcaatactattcacctgcgcggcccaaaagtgatcaatggcgaggatcgtattacgcgtacccccttagtcggttccctttaatccgcatcaataatgcgggcatacatattaacgtcgtgatagtcgccgttaagatactccgcctgcttcatacagccctccagcgtaaaatggttgcgccgtgcgactgcgttactggcctgattatcaacgcggcatttaatgacgaagcgccgaatatcgccgcgccgggcataatgtgtcatcagcgcctgtaatgattgcgacattatcccttgtccctggaaggactcatccagccagtaaccgatataggcggctttgtttatcggttcgatggcattaaatgagagtacgcctgccatctcattctggcagaaaatcaggtacattttggcgtaaccacgctggtgcaacagtatattaccctgcacatgcttacgcgtttcctcctgcgacgtgacatattgcggccagtcgagcgactgttgtagccacgctttgtttttgagtaccagttggtgcagcgccggaacatgactttcatctgccgctcgcagttccagcgtcgtgctaacaggaataatttccaccatcgcgttgcccttcttcgttgttggtcgtgatcacataaatagcctggtttaccgataacccgcaggtgatatgagcgtttttattgtatcgccatcacattattttttattggccatatttagcgtatttccgcgtgacacatttcacacttatccaaccattctccgcctataaaacgctcaacgactgattgttttatcaccacggagacgccaatgaccttttctgtgcaggaaacgcttttttctttactgcggctaaacgggatttcaggacatgaaaacagtattgcaaacgttatgcagcacgcgtttgaacagcaggccaaagacgtctggcgggatcgcttaggcaatgtcgtcgcccgttatggcagcgataaacccgacgcgcttcgcctgatgatttttgcgcatatggatgaagtgggttttatggtacgcaagatcgaaccctccggttttttacgttttgaacgcgtaggcggcccggcgcaaattactatgcccggttcgattgtgacgcttgccggacgttcaggcgatatcatgggctgtatcggtattaaagcatatcacttcgcgaagggtgacgagcgcacccagccacccgcgctcgataaactctggattgatatcggcgcaaaagataaagcggatgccgaacgaatgggtattcaggtggggacgccagtaaccctttacaacccgccgcactgtctgggcaacgacctggtatgcagtaaggcgctggatgacaggctggggtgtacggcgctactgggcgtcgccgaggccctcgcctccacaccgcttgatatcgcggtattcctggtcgcgtcggtacaggaagagttcaatattcgcggcattattcccgttttacgacgcgtgcgccccgacctggcgattggtattgatatcaccccctcctgcgacacgcctgacctgcaggattactcagatgtgcgggtcaaccacggcgtcggcatcacctgtctgaactatcacggacgcggtacgttggcgggactgattacgccgccgcgtttgctgcggatgctggagaccaccgcgcacgaaaataatattcccgtacagcgtgaagtcgcgccaggcgtcatcaccgaaaccggctacattcaggttgaactggacggtattccctgcgccagtctttctattccctgccgctatacccactcgccagccgaagtcgccagcctgcgcgacctggctgattgtatccgtttactgactgcgctggccaacatgtcgccagaacagtttcccattgagcctgaaacaggcgctacacaagaggcacgaccatgatgaaaaagatccttgtggcatgtggtaccggcatgtcgacatcaaccatgattgcacaaaaactgcaggactttcttgcggagcaaggcattgcggcaaccacggcgcaatgttgtctgaatgagatcccgttgaactgtaacggtatggatctcatcgtaacgtccatgcgtacgcacagtgactatggcatcccgacgctcaacggcgccgccctgctgacaggcatcaacgacgacgcattaaaacaagaaatcaaggcgctgttaacacaataaagggggcattatgtttgattacatcctgtctctcggcggcaccgtttttgtgcccatcattatgattatcatcggcttaatctttcgtattccctggctgcaggcagtgaaagccggggtgacggtcggcatcggttttgtcggcatggggttggtgatcgtcatggcgatcgacagtctcagtccgccgattaaagtgatgattgagcgttttggcctgacgctgcatgtgtttgacgtcggcgccgggcccgcatccggcgtcggctatgcgacggccatcggcgcgatgatcattcccgttatctttctgctcaacgtcggtatgctggtgactcgtctgaccaaaaccatgaacgttgatatttataactactggcactacgccattaccggaacggtcgtccagttgatgaccggcagtctgatttatggcgtactgggcgcgatttgccacgccgccttgtcgttgaaaatggccgactggacggcgaaacgggtacagaacattgtgggtctggaagggatttctattccgcaagggtatggctccagttccgtgccgttgttcgtattgctggatgcgatatacgaaaaaataccgtttatgaaaggacgcaatattgatgctcaggagatccaaaaacggtatgggatggttggcgacccggtgatcattggcgttgttctcgggctgatcttcggacttgccgcaggcgaaggctttaaagggtgcgcaaccttaatgattaccgtggcggcgattatggtgctgtttccgcgcatgattcgccttatcgttgagggattaatgcccatttccgacggcgcgcgtaagttcttccagaaacactttaaagggcgcgaagtctttatcggtctggataccgcagtgacgttaggccacccgaccaccatcgcggttggactgctgttaattcccatcatgttaattctggcgagcatactgccgggcaataaagtcctgccgctggctgatttaccggttgcgccgttttttatctgcatggccacggttattcatcgcggcgatctgattcgtactctgctcagcggcatcattgtcatgattaccgttctgctgatcgccacccagttcgcaccgtactttaccgatatggcgctcaaaggcggctttagcttcgccgctgaaaacgcgcaaattaccgcgctgtcggtgggaaatatgtttggctggtcaatatctgaattgatgtcgctgggcatgattggcgtggttattgtggtcggcattgtcgccagcatcatacttgtcttacgtaaacgtgaactaccggaataaggagcaacccagaatgagttggctaaaagaggtaataggaacagaaaaagccgttatcgccatgtgccatttacgggcgttgccgggcgatcccgggttcgataccaggaaaggcatgaactgggtaattgaccgcgcccatgacgatttaatggcgctacaaaatggcggcgtggatgcggtgatgttctccaacgaatttagtctgccttatttaacgaaagtcagaccggaaacgaccgccgcgatggcaagaatcatcggtcagttaatgagtgaaatccgcgtaccgtttggggtaaacgtgttgtgggaccctgtggcctcgtttgatttggcgatggcgaccgacgcaaaatttatccgcgaaattttcaccggcgcttacgccagcgattttggcgtctgggatacgaatgtcggcgaaaccattcgccatcagcatcgcatcggcgcaggccacgtgaaaacgttgtttaacatcgttccggaagcggcggtgtatctgggaaaccgcgatgtctgttcaattgcgaaatcgaccgtatttaacaataaccccgatgccctgtgcgtctcggggctgacggcgggcgctcgcacggatagcgccatactgaagcgagtaaaagagaccgtccccgacacggtcgtgctggcgaataccggggtgtgtctggaaaacgtcgaggagcagctctgcattgccgacggatgcgtaacggcaaccacgtttaaaaaagacggcgtcttcgccaactttgtcgaccaggcgcgcgtggcgaagtttatggagaaagtacgccatatccgacaataaaatggggataagcaaaacgcttatcccctgcagagagcgataactcttctgccgatctccgtcgccttcgccaaaagacacgccggggatcggttccagagtaacccgaaccggcaaggagtcaacgatcgatgattaatgatgttaagtgggttcaggcgcaacgccatgccagcgactggcgacacgcgctggatatcgccgttcgtccgctgattacgttcggcgcggcggccccctgctacctggacggtattattgagaacacccttaaatgggggccatattatcttatcgcgccggggattgcgctgccccatgccagaccagagcaaggcgccaaccataatcaaatcagcgtcactacgctatcaacgccggtcgctttcggcaatgcggattgcgatcccatctggctgttgctttgcgccagcgccacggatgccgaagcacatattcgcaccattcaacgcatcagccagtggctcgactcgccggaaagcgtcgcgatgttgcaagatgcgccaaatgatgccgcgcttttcgcgcaattaaccgcattgcgctgatggaggttccgatgatcctgcacccttcactggcctccgccgatccgctgcgctatgccgaggcgttgaccgctttacacgatgcgcctctcggctcgctgcatctggatatcgaagataccagtttcatcaataatattaccttcggtatgaaaaccattcaggcggtcgcacaatacactcgccatccgctctcatttcacctgatggtctcatcgccgcaacgctggttaccctggcttgcagctatccgccccggctggattttcattcatgccgaaagcgtgcaaaaccccccggagattctggcggatattcgcgctatcggggcgaaagcaggactggcgcttaacccggcaacgccgctattgccttatcgttatctggcattgcaactggatgcgctgatgatcatgaccagcgaacccgacggacgcggacagcaatttatcgccgcgatgtgtgaaaaagtgagccagggcagagagcatttccctgctgcggaatgctgggcggacggcggtattacacttcgcgccgcacggctgcttgccgccgcaggcgcacagcatctggtgattggccgggcgttattcacgacggcgaactatgatgtgacgttgtcacaattcaccgcgctataaaggagtcatatgctgatgagccaacagcgccccgaccgtatcaaacagatgttgcattacctttggcaacacaggcacctctcaacacagcaagctattgagctttttggctatgcagaggcaaccgtgcgccgggattttcactatattgccagccgttatcccggtatggttcgcggccatggttgtattgacttcgacgacagtacggaagataaagaatatgttttcgacgttaagcgaacgttacaaagcgaggcgaaacgcgaaatcgccgccctcgcccgcacgttcatcaaggatggagactgcttttttctcgactccggctccacctgtctggaactggcaaaatgtctggtcgacgccaaagtaaaagtcatttgcaatgacatcaaaatcgctaatgaactgggtggcttcccacacgtagagagttacattatcggcggactgattcgccccggttacttttcggtgggcgagagtctggcgctggagatgattaacgcctttgccgttgaacgcgcctttatctcctgcgatgcgctgtcgattgaaacgggcatcaccaacgctaccatgtttgaagtgggcgttaaaacgcgcattattcagcgctcacgcgaggtcatattgatggccgatcactcaaagtttgatactgtagaaccccatgcggtggcgacgctgtcctgtattactaccattcttagcgacagtgcgctcccgtctgctatcgcccgacgttatcagcaggcgggatgccgtctcatcatgtcagacccctcatcaggagcgcgttaatggacatcaggcaaatgaacagaacccatctggatcactggcgcggattgcgaaaacagctctggcctggtcacccggatgacgcccatctggcggacggcgaagaaattctgcaagccgatcatctggcatcatttattgcgatggcagacggggtggcgattggctttgcggatgcctcaatccgccacgattatgtcaatggctgtgacagttcgcccgtggttttccttgaaggtatttttgttctcccctcattccgtcaacgcggcgtagcgaaacaattgattgcagcggtgcaacgatggggaacgaataaagggtgtcgggaaatggcctccgatacctcgccggaaaatacaatttcccagaaagttcatcaggcgttaggatttgaggaaacagagcgcgtcattttctaccgaaagcgttgttgagggaaatcatacaggaaaaggtcgggtatagtacccgacctttatattactggggcagatctttttcagttaacaagcgtgtcgttttcacttgttcaatatttctggcgccacccaacatcatgttaattgtcagctctttgtttagctgttcaatcactgatgccacaccctgagcgccgccaagattaagaccgtataatacaggccggccaaccgccacaatatccgccccgctggctaacgctttgaatatgtgcgaaccacggcgtactccactgtcaaaaataacaggcactcgcttgttgacgacttttgcaatcgcaggaagcatatcgaatgaggacggcccgctgtctaattgacggccaccatggttagaaacccatattcctgcggccccggcctggatagcaatttcagcatcctccggcgactgaatgccttttacgataaccggcagaccggaaatacgatgtacataggcaatatcctccggcgtaaaggcttgtttagcctgcgcgtaaatttcacttatccctgctcctttgccagtttttgaaccatcgtcattttttctggcgaacatttccaggtttgcaaagcccaacgggaactggaagttatttttaatatcttcttcccgataaccaccgacaggcgaatctacggtcagaataatcgctttagcgccatgctttaccgcttgtgcaagaataaattcgttaaattgattattcttactcatataaagctggaagaagaacggatttttcccggaaacgttagccacctcttcgatggtcttgttgccataggtgctcaacgagaaaatcgaaccgacctgcgccatgcctttcgccgtcgccaactctccggaggcgtgggccaggccctgcgccgccatcggtgcctggattataggcgttttaagcggaatacccagtagctgcgttgataaatcgatctcttttaactcaatgccctgtaatacgcgcggcataatatattttttgtcaaagctttcggtgttgctgcgaaggttattctcatcttcggctccaccgcgaatataaccaaatgcccctttctccattttggcctgaacgcgcgcttccagggaggctacgttcgtcatttttattgctttttcgtccgtactggctttgtactcttcagcataagccaggcctgatgttgccaacattgccagcgaggccactacccgaatgaggtgatgagttttcatcattattccctttattgcttaaccgcttctgcctggatttttatatcgacaactttcgtcatccccatatcgaccagataatctatcccccactgggtgcgatctatttgcgtgacaaaatcaccaccgcaaacctgcgccttgaatatcgggctcatataacagccaaacttggtggtggttaaggtgacgggcttcgttactcccttcattgttagcaaaccgtcaatagaaaccggtttattatcttcaaaatgccattttgttgatttaaataccatttctggatatttttccgcatccagaatatcgctactgcggatatggttatcaaacgcatccaccccggtatttaaggcgcttacgggaatcgtcacacgcatctctgcgacttgcttttccggctgatatttcagttcgccgctaatagcataaaacccgccatgattggttgaggtctggaaatgatcgatattaaataccgcattggtatgcgtattatcaaatttatatacatctgcatgagcagcacttaataaacccagagacaggagagcaccaagaaaactctttttcattatattcactttatatcttaaataaggtgaagctatcttaatgtcccctgtacgcaggatcgagagggataaacaggaaggactgttgcaaaaatagaacgatgaaaaggccgtgtcacaaaaacagcagctcacgaatgagtttatgtcagggctatttccgcaacctgtaccgcctttgtggcggtacagaaggcaaactgactaacgcatgatacgatcgtcgacataacggcgcttatccggcgcgggcgggaaatactgatacagccaggtttcgctgatagcctccccctggcagcgcaggaacatacgcatatccaccggtgccgtagaatccgaggtcggataccagtcaaactggatacgataaccgtcgaaaggctcaacgtagaggatctcaatctgcttcgcctcaccgctggagagcgtaattaccggctcaatgccttttggcgcggccgctttcagatcgccgccgacaaaatcaatagcaaaacggcgcgcccatttatccgggtaatgttcgcccggcgcccaaccttcgggaaagccgcccatccctgtacgggtcgccatgacccgcgcaagcggcgattgtaccggcggctgcgcgctccagtacaaacgataattgaacgccagcgtatccccggctttgatcgctttttccggctgccagaaacagaccacattatccagagtttcgccagtggttgggatctccatcaggctaaccgcgcctttcccccacttattgcgcggctccacccacaggctcggacgtttgttgtaccaccccatcacatcctgataatgcgagaaatcgcgatcgagttgcagcaggccgaaccctttcgggttatcgtccatatatgcattgaactgcaatttctgcggattattcagcgggcggcaaatccactcgccgttaccccgccacatcgccagccgatcggaatcgtgaatttgtggatgaatggtgtcgcatacccggcgttcattattcccacagctaaacatactggtcatcggcgcaatgccaagttgcttaatatctttacgggcgtagagatggttttctacatccatgatcacctgcgatttttcgcaatgaatcacaaatttatacgcgcccgtcacgctggcgctgtccagcagagcgtaaacggtaaacgtagtatcgcccggcttcgcggtgtcaaaccagaatgcggtgaagtcagggaactcttcctgaccgtcagtataggtatctatcgccagcccgcgagccgacaggccatactgataagtatcatctaccgcccggaaataactggcgcccaggaaggagacgacatcgcgccgcgccagttccggcgctttaaagacacggaaaccggcgaaaccgagatcgctctgcccttccagttgcgtcgtatcgacgccggcatcgttgtatttaaacagttccgggcgaaaatgaatctcgcgagcaagatgcgtcgtcgtatcaacggaaaacatgcgtacgcgacgacgaaagcccatccctacgtggaaaaactgaatatcgagctgccggttggcaacaccgttccagagtgaatgcgccgcgtcatactgaatgctgttataggcctgcggcgtcagattggcgagcgtatccggcaagggtcccggcgcgccaccccagggctttttcgctaacgcctgggccattgattgcagaccagcaaaatcaaaacggacaattttaccatccgcaatatcggattccgcggcaaacgccgcctgagaaaagagggaagcaataccgctggaaccgcacacggcggccattgccattgaacctttaataaatcgtctacgattcatacctgaaaatgagtccttctggtcttgtgaatggtcccgcgctggttttttcagcagcaagaatgtgcccgtttctgaccgctcactctagacaaaattcattaataatccaattgttggtcgcctggaaactgtgcaaaagcgtaaatattttatgtcgataagaaccgaccgaatcggatgtaaacctcacgcagcattcttcaggttatgaaaagtttattccagactaacgtgatgtttcatgactcgtttaaacagcgccagacgcgcacgcataaagcggttttccactttaaaaccggcaagtttgttcagcccaatccgcaacagacgatctcgcccccgaatgctggcgggccagcgaaccgggccgtgcagcacgtcgcgcgtgcggctggcatgacgagcgaaattcacccagtaatccgccacctgcgaggcaaaggccaggtcattctcattcacataatggcatgtgggctcagcccgcgttaacgtatcgaatacatacggtatttcattgccatgacaggcaccattcgcgtaggtgttatgctccgcttcggcgacataatcaaaccagtaacgccagcacggttcgccgatccgctgctgcgcttgcatgacgacataacccaacgtggtaaataccatatcccgacagacctgccgccctagcgcttcgtcgcctttcactccaggataaagcagccggattaaccccaggccaacacgccgctcacggcgcattttttgaatttgaccggcaatatcgacgccaaaaacggccaatacgctggcttcatcgctattcgagccgatcatcaccggtatcggatgctgtttcgccgcaaagaaggtttccagcatcggatgcggcagcacgacgtcgccggaaatcggcgtcggcgcaattttaaaaggcgcgtccagcggccaaaacgtctctgccggtaaagcgcgtagctgttcggcagtggcatgggctaaaccaagatgttccgccagcgcaacgcctttttttagcgccacctcgcggggcgtatccggcagcgtataaccactctgaataatcgctttatgaaaaagccccttcgccaacggcgaagccatcaacgacagcacgctgcgggcgccggcggattcgccaaataacgtcacattctgcgtatcgccgccaaacgcggcaatattgtcctgcacccagcgcagcgcagcgatttgatcgagtaaagcaaaattatgaatacactccgcctcttcgccttccagcgccggatgcgcgaaaaagcccagatggccaagccgataattgaccgtcaccacgatcgcgccgcgcttcgccagcgcttgaccgtcatagggcggcaaactccccgcgccaatggtataaccgccgccgtgtagccagaccatgaccggcaacggttcatgacgcacggcgggagcccagacgttcagatagagacagtcttcggaaaaatttcccggatcgccgccgccgagttcgcgacaccaggtaatatcctgccaactggcgcaggagaaacaatccgcctggcgcacgtcgtgccagggcgtaacaggctgcggcgcacgccagcgtagctcccctgttggcggcgcggcataaggtataccgcgccagatatggatttcttcctgtacgacgcccacgattttaccgtgacgcgtctccaccaacgggatggagggattcaacataacgccttccttttacagtatcctcacagcctgtgaagcttaccgcttttaaagcagaccgcaacggcgtttactgcgttcttccgcttcctgatataacgaaaattcatcccgtactgcacatcccagcgcctgttcaaaggcgtcgcggctggcattgccgtggcttctggccagcgtttcatctcccaaattcgactgaaaaatgccggctgcgctgaccggaagaaaatcttcataggtaatcggctgcgcgattacccaaccgcgctcaataagcggctgcggatcgtcgccaggatggatcgcctgacgatgcgcctcgccggaaggcgttaagcgatagcggaaccaggcaagcccctgctggcgaagcagaaattcgctatccggaaaggcgttaaagacctcccgcaaatggagttgatgcgtgaagttatccttacccgttcccgccttgtgcaacagttcgtcatataatcgacgaccttttggcgtcagcgcgacgccacgttgctcaatttcgccgaagcgcgccgtgtgcgtaccctgcttttcatcaacgaagagcacctgctcttccagagctttgaaactggtttgccgcaacagaataggcacttcgcggcgaggcggaccttcgataagaattttaggcgtaatgccgcactccggcatcatggcctgtacccggtcgatatccagagtacgcggcgtcagatggttaatgtggcatcccggaaaacagaccacgtcggcaattaaacgatgctcacgatgcaggctgcggtacgtttcttcatcaacggtagcctgacgatgccagcgaaaagtctccagcgtttcacggacgaactcttcggcctgagcagcgctaaaaccgccctgctcgtcgtactcatccagcaattgtcggcagcgcgatgtaaaaatatcacgctgcgataagatttccgccgcccgctggcgtaatgccgcgttttcaatgagctccaggcgtaatagcgaagtgaacatgcgaaagggattacgcgagagcgaagcctcgtcaatgggacgaaatgccgtggagtgcacaggcacgcccgcctgagagagatcgtaataacttactgggtacatccccatgatggcgaatatccgacgcaaggtagaaagttcttctgcggtgccaacacgaatggcgccatgtcgttccacgttcaatcgcgccagttcatcggcattagccaactgctcatgcagtttgggattattttccagcaccgccagattcacgtcagccacaagttccagtaacgtaccgtactgcggaacttcctgctggtacattgccgacattgcctgcgaaaagtgttcccgaatctcatctgccgtgatggtgttcgccataatgtcatgcctccagtgaatgttacctggagtgtagaaaacctcatccattccggggagaagaatttataaagtgtgatccgacctgaattcattatgcagaacggattgacatgagctggcatatccccgaccagatcgcggcttaacacgcttaacggcagttgaatcatcagtaaaataaaacagttgtaacttgaaatggtaaaatgttaataatattttgctatcaggttatcaaaaacaaacaactttacttgtcacccgcacggctctgtttttaacatcgcttatggaaaaaaatggtctgtttagtcagcgcattcggttgcgccaccttcatacatttgtcgccgttgcgcaacagggaactctggggcgcgcggctgaaactcttaacctgagccagccagcgctttctaaaacgctgaacgaactggaacaactcaccggaacccgtctgtttgaacgcgggcgactgggcgcgcaattaacggttcctggcgaacaatttttgactcatgcggtaaaagtattagatgcattgaataccgccgggcaggcgctgaatcgcaaagaggacgctagcgccgatgtggtgcgtgttggcgcgctccccaccgctgcgctgggtatactcccggcggctattgggcggttccatcaacagcaaaaatcgacctcgttacaggtcgcgaccatgaacaatacgatgttgcttgcgggtcttaaatcaggcgagatcgatctgggtattggccgcatgtcagacccggaattaatgggcggtttaaattacgaactgctgtttttagaatcgcttaaattagtggtacgccccggtcatcccctgttacaggagacgatcacgctcagccgggttatggaatggccggtagtcgtctcgccaaaaggcacggtaccgcgccagaatgcggaagccctgttgcaaagccaggggtgtaaaatgcctgccggatgtatcgaaacgctatccgcatcgttatcacgacaactgaccgtagattacgattacgtctggttcgtcccctctggcgcggttaaagaagatcttcgccaggcgacgctggtctcattacccgtgccgacccagagcgcgggcgagccgataggtattcttacgcgagttgatatcccgctctcaaccggggcgcaaatgctgattgcggcgatccgtaaatcgatgccgctgtgatagcggctgtcggagaataaacgcgcccgcggctaaaatagcccgctggcgcgacgcttactaaaggaaggatgatcgcatcgtcgcgccagtatcatgtaaacgaaacgcatcaacggcttgcgtcaagcgggcagcctgttcttcaagcgaagctgccgccgcggacgcctcttcgaccagcgacgcgttttgttgcgtaaccctgtccatctcagaaatagcctgactgacctgaacaataccgcgactttgctcatcagaggctgccgcgatgtcgagcataatatcggtgacgcgtttgacggcatccacaatctcattcatggtgctccccgcagcgataacctcttcagatccttgttcaatcaggctgaccgatgcgccgatcaagccttcaatctcttttgccgcctgcgcgctgcgactggcgagggtacgaacctcactggcgaccaccgcaaaaccgcgtccttgttccccggcgcgtgccgcctcgaccgccgcgttcagcgccaggatgttggtctggaaagcgatactgttaatgacggcggtaatttccgagatttttttcgagctggtggaaatattccccatcgtttgtacgaccccggaaaccatctggcctccgcggctggctttaccggaagcatcttccgccagtttgctggcgtgatgcgcattatccgcattctgcttaacggttgccgtcaactgttccatactggccgcggtctgttcaatggcggcagcctgctgttcagtacgagaagataaatccgtattaccagcggtaatttcgctggtgcctcgataaatttcctccgccccctgacgcaccgcccctaccgtttgttgcaacgcatgctgcatctgctgaagatgatggctcaggcgaccaatttcactgcgtcctgtgggctcgtcagccatggtcagatcgccggccgcaatgcgttcgatacgtgacgcagactgctgcaagggttgtatcaccgtgcgacgcagcaccatgaaggtcattaacgtcaataccagcgccaacgtaaatgcgccaatcataaacatcataccgagccgggtacgttggtaagcctgctcgctaagtagtctcgcccgctcggtgcgcagttcaatcgctttcaacaggacatggttatatgcggcatccagttgttttgcctgctcgttttcatgattaatgatcgcttcgaacatgccatttttggcaaatttcagcatcggttgcaggccgttgatataggcggtgtagcgggcgtttaactcgttatctaacgcgtcatcggcgggtgttttcaccgctctggacatataagcgttaaagccgtcctgagactgcttgatccgcgtttccgcagcggcaatattggctttcatttcatccatttcagcaatccggctcgccgcgccagcgtggatcatattgatacgtgcggtacgtaagtggttagcgctgttggataatcccatccgtacctgaatctcgtccgtgacatcacgctgatcgcgatcggcctgtaacagaaaatagcctgccagcccggcgctcaaagcaaaaagaagaaggatgccaccgagaatggaggaaaacagcggaaccagccgaatatgatgcaggaagcccagtttatgcgaggcttgcatcgagaatgtgttgcccatgaccgtcgactctcttgtaggttttatgcgtaaaacacgcccgttagatagtcatcggcacttcgtgacgtttgcttatcgcgaaaagcatcgccttcgtcacattttcacaacattcattccagaaaattcagaaaagcgccagcggaaaatccgctggcggatgaatcagttatcgccaaagtggataacagtacggatggatttaccctgatgcatcagttcaaaggcatcgttaatctgctccagcggcaggcggtgagtaataaaaggatctaaacggattttaccgttcatcgcatcttcgaccatccctggcagctgcgtgcgccctttcacgccgccaaaggcggagccacgccagacgcgaccggtcactagctggaagggacgggttttgatttcctgccctgcccccgctacgccaataataatgctttcgccccagcctttatgacaacattccagcgctgctcgcatcacgttaacgttgccgatacattcaaaactgaaatctacgccgccatcagtaagctcaacaataacgtcctggatcggtttgtcgtaatcattcggattaataaagtccgtggcccccatttcgcccgccagcgtaaatttttccggattcgtgtcgacagctaaaatacgcccggctttagcctgaaccgcgccctgaataaccgccagcccaataccgcctaaaccaaaaacggcaacggtgtcgcccgctttcactttagcggtgttatggacggcgccaataccagtcgtcacgccacagcccaacagacacactttatccagcggcgcctgcgggttcactttcgccagagaaatttccgcgcaaacggtatattcgctgaacgtgctggttcccatatagtgataaacgggttcgccgttataagaaaagcgggtagtgccatccggcatcagcccttttccctgagtggcgcgtacggcctgacaaaggttagttttaccggacttacagaacttacactcgccgcattccgccgtatacagtggaataacatgatcgccgggtttcaggctggtgaccccctcgccgacctcgactaccacgccgccgccttcgtgacccaggactgccgggaatacgccttccggatcatcgccggaaagggtaaaagcatcggtatggcaaacgccggtatgagtgattttgaccagaacttcgccttttttcggcggcgcaacgtcaatctcgacaatttttaacggctgaccgggaccaaaagcaactgctgcacgtgatttcatatatctcttcctgttacggtgagggaaattgttattttagataagcgcgaagaagatggccgatttccgccatccgaaccgcgcgctgatctggcgtagtctccccgctgaccagctcatctttcagatggatttcaaccatttcactcatcaggccattagacgcgccgcgcacggcggcaatctgttgcagaatcgccagacaaggttcgccagactcaagcgcccgctccagcgcttcgacctgcccgcgtatgcgacgaacacgggtaaggatacgttttttatcttcaggtgaatgcggcattcgacctccatatactataggggggtatactatcagaattttatgtttatgtaattgtaaaattacgcacaatataaaaatcaatagcttatagatttccggcatagaccatcaagaatcagttcacattcagcatattcagctcatgggaactttttcaggccacagacaataaacaccaaagctttctttctaagctgcaatgttctgcccgactggggcacagaggtaatgccggtaaatccagtcccattacccagaagtaaatatttgcttaatagtttttatttactcaccaggtggtaatgaataaaggttatgatatgcagatgtcagtcttgtaagaacgtaacatcacaactgcgatacaccgccgacgggtagcgaaaatatctcaaccctgtgtctttcaaggcttagtcaatgtggacaaaaaatcaaatgagcgttatttgaaagatttttaatacccaaaagcgtcatcattattgttaatttgaaatcaatctcaggtaataatccatgcctatttcgatttgtaaacatggtgctccttttgttgttcaacatgaaaatcggtacggttccggtgcaagtcagtcatcatcactttcaaaatcaatccgccatattagcaactctcatgaggaaataaaatttataagttgctatagtgcaaatggagcctgtttttccaatgcacagatgctagccaatgcctcagggaggcctgttataggttactatgggaaaataaataagttaacagccagtctggataatagcggtcgtatattccgcccacagcataagcttgcggccaatatttgttatgtaggtaatcggcttctgagcgctccagttcaacttgggtttggcctgaaacatctgctaacctgtcactcaaatggtaatgtcagataaagtgtcatgccatgtccttcccggcattgctattccacagcctacagatatgggcgctcagttctttcctcaatcgttgctatgggaagttctgccgtcatttcacgctcttgccaaccagcattttattaaagcctgacttttaccagagtaatttcataagagtgcccatcttctggtctaaaaataataaatctattgttatttttagtaaaggatttcgacaaaataaaactatcatgatatctggccaggacgtagtaccagcctccatcatacaatatcatttcgtattctttctttaattgtggtttatagatcccaacaaaaaaagaaaatataaaaaaatatataataaaaccaagcataactatagtgaaacaatgccttcgcacccaactgagttgcgtaaaacaaatcactggcatcaatttactataaaaacgcatccccaccgataagcataaagctaccagtaaaatgataaaaaaaagctcccacaaaaacgattctgttaagagagaaaactcgataacaattggaataaagaacaaaaccgctgccaaaaaaagacgtaaaaagctaatgtcgtggatacgtgctttttgctttactagaaaaaataatagaatacccactccccacgctattatgaatatagccatcaggctaatcgcatggaatagacttcgggcaatgttgtcagggccgacgcctacataccaccacgggaaaccatagtacgcggagacgccccagccataaaaataggcgcttccccatcccaaaccacctaaataggccaaaagcatcgaagagtttttaataattgaatcatcattcattatagttaactcacttaagaaatatttaatatgaaaatagaaatcaaaatgtcacataaaacactagcactttagcaataatagtcggatgataagtttgtctgtttttcctgagtatcaagccagctcatactcacgccagcacactaaaatcaggagtggcttcttttttagatctttgccttagccaggcgcacactcaataatgatagcagtcagataatatgtaccaggcattaacctcacgttgttgatgatatatttacttcgttgaaaaacaataaacattgtatgtattttattggcgacgaaaaactgttaaagaagcgtaattccatatacaccatttacctgattacttttcttgctaatatttgctaattaattatttgctaaagcgtgtttaataaagtaaggaggacactatgccattgagtgttggacagggttatttcacatcatctatcagttctgaaaaatttaatgcgataaaagaaagcgcacgccttccggaattaagtttatgggagaaaatcaaagcatatttctttaccacccaccatgcagaggcgctcgaatgtatctttaatctttaccaccatcaggaactgaatctaacaccggtacaggttcgcggagcctacatcaaacttcgagccttagcgtctcagggatgtaaagaacagtttattatagaatcacaggaacacgccgataagttgattattaaagatgataatggtgaaaatattttgtctattgaggttgaatgtcatccggaagcttttggtcttgcaaaagaaatcaataaatcacatcccaagcccaaaaatatttctttgggtgatattaccagactggtattttttggcgacagcttgtctgactccttagggcgtatgtttgaaaaaacacatcatatcttaccctcctatggtcaatactttggcggaaggtttactaatggatttacctggactgagtttttatcatctccacacttcttaggtaaagagatgcttaattttgctgaagggggaagtacatcggcaagctattcctgctttaattgcatcggtgactttgtatcaaatacggacagacaagtcgcatcttacaccccttctcaccaggacctggcgatatttttattgggggctaatgactatatgacactacacaaagataatgtaataatggtcgttgagcaacaaattgatgatattgaaaaaataatttccggtggagttaataatgttctggtcatggggattcccgatttgtctttaacaccttatggcaaacattctgatgaaaaaagaaagcttaaggatgaaagcatcgctcacaatgccctgttaaaaactaatgttgaagaattaaaagaaaaatacccccagcataaaatatgctattacgagactgccgatgcatttaaggtgataatggaggcggccagtaatattggttatgatacggaaaacccttatactcaccacggctatgtacatgttcccggggctaaagaccctcagctagatatatgtccgcaatacgtcttcaacgaccttgtccatccaacccaggaagtccatcattgttttgccataatgttagaaagttttatagctcatcattattccactgaataaagttccatcggctgcggtacgccttgagcaaaacacagctcaatatcatagtgccggtggcatgaaaatatgatgctatctttgctgccgattggtcaataagtgatacatagtctatgttcagtaagacaaaaatggatagagtcgataaatcgccaccgtaactaaaatactcactatcacactgacaataaagtatgttttgaatggctgcttttgcgttttatgacggaagagttgttgaccaacaatcgccccaggccacccaccgacaaccccaaacaccaacaaagtggattccggcactctgcgccaggttttacgtgccgccgttttgtctataccgtagatcgccagcgttagcacattggcgagcaggaaccacatcgcgacgggatgcgatgtaaaaatgcttccgaccgcagcgaagatcaggagtaaataacaaaagcggttaagatacatatcattatgtcatagcaataattaggggcatcggagcccattatacgcgatacatgcgcctatgtgatgtagaatttttttcactcagccaacgagtcattaaggattcatttttaattaccatggtaatcataaggtaattaacggctgtgaacacgattaaaatgggtaaagccaccgaaaatgttaccaccttaaccgttgccaggataacttaatgaagaaccctctttattgctgtttgttatccggttggcagtctcagttttggatttattaatcgtatttatatttattacataagatgtacgatgttaatttgagaattttatctcaacaaccgtatatattcagatatttctgaattaagattatcatcgattaaaacaagttaacgttttgataaacataacaacatcgtcagaaatcatgatttgttgtcgtttgttcatgagacaaataatttatatgcttgcaaatatagatagcacgcaaatcaacttagctcaaaaaatgtatttgacaagaaaagataagtctttatattggccctggatagagtggtaagatgataattagagacatgaaaggcaccgtcactgaagcatttatctgcttatcatgtaaatatgtatgcgtaaatggagcataaactatgtccagtatactaatgtctatggtatctttacattttcacctttcatggtgtcgctgcactcatatccagttgatatcttatggtatattcaatccattccctttgatgattcctgtcaaacctcctgattaaattagttaacagcgatggaatacataacgttaagtactttacgcctgcaaatgtcaggctcacgccctaatgcttaatttataatacgcattaccttactacaggaaatagatagcatgttatccaaaaaatttggcttatcgatgatagtgttgggaataatgtcgtcttcagcgtttgctgatagcatcgttgaagggagaacactcaatgtcgcagtatcaccagcctctccccctatgttatttaaaagtgctgatggcaaattgcaggggatagatctggagcttttttcgtcttactgtcagtcacggcattgtaagctaaacatcaccgaatatgcctgggatggaatgcttggcgcagtggcgagtggtcaggcagatgtagcattttcgggaatttcaatcacagataaacgtaagaaagttattgatttctctgaaccttattacatcaactctttttatctggtcagtatggccaatcataaaataacgctcaataacctcaatgaattaaataaatattctattggataccctcgaggaatggcttactccgaccttatcaaaaacgatctggagcccaaaggatactactcgttaagtaaagtaaaattgtatccaacctataatgagacgatggctgatctaaaaaatggcaatcttgatctggcttttatagaagagccggtttattttaccttcaaaaataagaaaaagatgccgatagaaagccgttatgttttcaagaatgttgatcagcttggcattgcctttaagaaaggctctcccgtgcgcgatgatttcaacttatggcttaaagagcaagggccacaaaaaatatctggcattgtcgatagctggatgaaatagtaagctatgtcatcaggtaatatgctggctatcttttatttcctattggaagggattggtaatacgctgcttgtaacatttacctgttttctctcagcgtttttgaccgggcttacagtcgccgtattacggcgactatcccctcttccactacagaagatactcgacgtactggtctttattcttcggggaattccaatacttattgctgtttttcttgtttattttggattgccatcgattggcatatatgtttcaccactggtggccatgaacctcagcgtcggcttaatcagcgggagttatcttgccgaggtgttcagaggggcgcttaaattagttgagccattcgaaataacggtagcgaaagtggcaggaatgcgtcaattacaggttataataaatattgaactgccacagatgttgcgattttctgtgcccggtattatcaatgagttttcttctgtattaaaagcgacgccctttgcttatactgtaggcatcgctgaaataacgaagcaggcaatgtcactgacagccatcacgctgaacgggttacagatttatactcttgccggggtattatatttcattatttataaagtatttactcttctggccggagtgtttgagaaaaaatatcgcatcagttgaaccataaaaatagaggtgatactcatggctttactgaaactaaaagagataagtaaggaatattcaggaaaaaaggttcttgatacggttagtctgaaaattcaatcgggagacatgaaagtagtcatggggccatcaggttgtggaaaaacgacgcttttacgctgtctgcttcgattagaagaacctgattatggcaatatttattttcacgggaaaaatatttacgacaaagaatttactattcttgagttcagaaaaaaagttggttgtgtcttccagaattacgctttgtatcgccatcttaacgtcatggataatattacccttgccctatgtaaagtgtttggcatgccgggacaactagcccgggagaaagccttacatgagctacaaaaacttgatatggcctcgcatagcgcgaaatacccttcgcaattatcgggcggccagcaacagcgcgtcgccctggcccgaacaatggtcaccgacccagaactcattatttttgatgagccgacgtctgcgcttgatccgctcatgactcgtgaagtcggaatgttgatcaagcaacttcacgacaatggcgtcactatattatgcgtcactcatgatattcgcctcgccagattactaagcgataacgtaacgtttcttaatcatggcaaaattcgtgcagaaggcgcttttaccgatcttgccttacgagaaacggatccagatatccactgtttttttagcgaggcacaacgatgatcgctggctggtctctcttctttaatgacctgactgaacaactgccacttgttgtggacggtattaaagaaacctgtaaacttgcgctgattgtttccatcaccggttttttgtggggaattattattttctttctgagcctgagccatcgccccgtggtaaaagccataactcgactgtacatggatttctttatcggtacgccactcattcttattctatttgttatctattatggtttacctcaatctggcattcacctgtcctcttttaccgtggcggttacaggttttaccttgaatgtcggcgcatataatgccgcgtacatgacaacggcctataacgcattgaataagtatgaaacggaggcagcagtcgttcaggggttgaacaaacggcaggtctttttgtggattatactgcctcaggtattgctgtcttccattccagccttaacgaatcaggtgattaataaccttaaagacagcaccatcgtttttcttatccaatatactgagtttttcgcgcgaattcaggaggttgctgcaaccagctttaaattcttccatgcttacctttttgccgccatagtgtatcttattggcgttacctttatcgtcggtttgacccggtttttagagcatagactgcttcgccattacggtcagggttactgagttgtactgcactattctgattaattcaccactgacattatcaaagttatttttatttagcgttgattaagattttaaccttcattattgcgttagatgtccattctggtctaagtcttactccattgaggatattatggcgctaccacaactatcaatatggcagcccggcgatgggttaagaaaaataaagtataaatatcatgtttgtctcattgtcatattctccgtccttatacggttgctgtttttaactgaccgctacctttggtgtgacgaagcgtccagcgtgctgattagtcgacatagcgtagataatctgctcttccatgccgcttttgacgtgcatcctccgctttattatctgttactgcatgactggatgatattatggggtgatagcattgcagcggtacgctctctcagtctactctttgggatcctgacagttgtgctggttatcgcgcttacgcgatggctggcaaatgaacgtacagccttattggcgggatggttcgccgccctgatgccgatggcagtccattacagtcaagaaacgcgcatgtacgcgttaatgggaatgctaacgctcgctgccgcgttagcattgatgatgtggataaaaacacccacccataatcgctatcttgtcgcgtatgctttacttatgacgttcagcttttacacccattatttcaccctatttacacttattgcccactggatcgcagtaacaatattatcctgccaaagccataaaacggcctgctaccttaaacttcctggctggtggtttgctaacctggcgattgctgtcgcttatctcccctggttgcccgtattgtttaatttactgactcatctggcgcagttgagagccggtaatgatatcggttggattccccccgtaacatggcgtgacctgcctgcgatgtactggcatttttttaccggaaacaacggacagggttttccgtcgttcattctgtggctggctgtaggaggttttatcggtactgtggggcgaatatctttatgcaacggagaatatgaaagatatcagctgatattattttgtaatctggtcatccctgtaatgctggtcttcatcatttcctggtggatgccgttatttatcgatcgttatttcttcttctcatcgctgagcattcctcccctgctcgcggtattacttacccgcgcaaaaaaagcggtttgtggcttctggtttatcttattcaccttattattcggctatggttcatatcataataaccctgagcacatagacgagtttaaaccactggtaaactatattaatacccgtcaccagcctaatgatgccgtggtagtcagtaaaatgttcgattatttaagttatgtgtattataataagcgagattatcgtacgtttctttatacaccgcctaacgcacacggaacatcaggcagaccgaatgcctatggctttggttcactgttttatgcgcaagccgatcagacatatattgatactctgacaacgctttcaaaaagttaccatcgtgtctggttggtaagcggcggtaactttagtcaggattaccccttgccgtcagaatggcaaaatatcgcaaaattcagaagtggtagatttcaggtacaattatttgtaataccaactcaacaggcgcgtcaaatgcaatgattaccgttttctatccagtgcagtgataaacagtactgccactgccagaccgcctaaaagtaaggtccagccaaacgcttcaaaaacctcaatcatatcgcctccaggtaggtgatattaaataaagatggctatctcagcgtaacatttaaaatatcaattaatgtgcaataatcgctttatgtgtttgaataaatattgttcttcctgcatttaattgcattgttattatcaaagggcttaatacgcgtacatcaacgattattaattatcagcttataataatatgactgttcaattcatttatcagctattattatcctctatattctttaagataaccgcttaattcataatatcgcctttattcgtcgcattaaattactcactcacctgattaatgcttgcctaacgattgcttcgttgttttaattccagcgcgaaattatttagtgagagaacaatgaagcatacacaacaatcaggcgcaaaagtctataacccattcacgcttagcttatatgactggtgggtactcaatatctcaaacaaatatgcctggaagtgtcctactgatacgcgactacttcctttcttcctgcatcacatgggcgagactcacctggatattggcgtaggtacaggttattacctgaaacatgcacctgcgactcatgccatttcgctgatggatttaaatccggatagcctgaaaatagccgccagccgagtgggtaatacgaaaatccgcgccacactacaacacgatgttttcgacacgttcccggcggactggcacgggcgcttcgattccgtttcgatgtactatcttctgcactgcttacctggtgagatgacaacaaaagcgaaggcaattaaaaatgccggtatggcgcttaaacccggcggcacactttttggcgccacgattctgggcaaagaggttcctcacaatgcttttggtaagaaattaatggctgtttataacaagaaaggaatattcagtaataccaatgattcagccgatacgttacgcagcgtgttggacgaacatttcgctaaggtgactttggagcaacatggcgccgttgcgctattttccgccactacgccacgctcatcgtaagtacaggcacttccgatcggtcggcagcgcgatcatgtgggtttaacccgttgattaaacattggattacggaatagtaattgcttattttatttgtcatacaaataagtataatacccgcttccgatgtagacccgtcctccttcgcctgcgtcacgggtcctggttagacgcaggcgttttctgtatggaatacgccatcccctctgatagatgccttgtttgccttaagcagttaaccccgcctgaagcaaacgtcatacaggacggtcagtcacgcttacgcggcatcatccgtaacagcgtattgtctttccagaaatagtgatgcatcaaagcagcgatggcatgaagtccaataacaaaatagcccagattcgccagcgtgacgtgccaggatttcagcatatctacgcgttcaaagttagcttcggcggcatggggcatagtaatgccaaatgcgacccagggattaccgcggttatacatcatgaccagaccaataacaggcagcgcgataaataacaggtaaatcaccagatgtcctaaatgcgccattccggtcatcatcggttttggacgaggaacaatgggcggcgtgggatatttcagccgaataaacaagcgtgccaccattaaaagcaaaatagtgataccacatgaaacgtgcgtcatattaaaccagggccgataactacgcggcgcaaaaccgcgcagctccatcgcggcgtaagccacaataaccagaaaaaagactaaccagtgaataccaatttgcaggccggaatacttattgcccatagcgcgtcctgaatgaaagccgtaaagcgacaacataaccagcttttataaataattcatcaaatttatgaaatggtggtcgcacttgcccgttcaccctcgcaaacgggcgatttttagcgtaaagctctctgtcctaacgcactgcgcagcgtagtatctgcctgcaatacctgccatgcgttttcaatatcgcgtgggatatcaacgtgaatgataaaatctttaccacgcggtccataccctgtttcatcgtcacgcaaacggggcagctcgccggcaatcagagacagataacgctccaccgtccagatgccctcttcaacattggcaaaacgtgtaccgtcattaaggtggcgcagtaccggaacaaaaccaggaaaactcagccagcgcggcgcatcggtgtcgtcgtttgtcacgcgccggaatgccgcgatagtgcgccgctgcatggtggggtcttgcacaacgatagccgtgttaatgttttctttcgcctgacggatcagtgcgcaggagaaacgggcattttcgccgcaattagttgaccgatcttccagccaaattttctcagccggaatatgccagaactggttcgcgatatccgcaaggatcgcggcttcagcgcgtccgcttgtgcgaatagtgtggtagcgcggatgccgggcaatcacggcgtacaaaaacggcgtcgaatgacctataccgccgctaatcagtaaaggaacgccttgcgctttggcgatgcgacaggccgcgtcgatagtggggatcaccgcattgcccgccaggacgacgcaatccgacgaataaggttgttcgccggaaaaatcattttgcgccagccactgtccgacggtattcaccgccagcaatgtttccgcagagagcgccggaaatggcgttgtattcataattcctcctttttgttccgaacttgtaccggatcgctttgaaagacgtcgtcgcctggctttttaggccgtaatctgatccatggcctgtaaaatacgcttatcggaaataggataaggcgtaccgagctgttgggcgaaataactgacacgcagttcttcaatcatccaacggatctctttaacatcatcatcttcgcgacgcgctggaggcaatttatttatccattgttgccacgcctgctggacgctttcgactttcagcatttgcgcccgatcgcggtgcggatcgacagccagtttctccagccgcttttcaattgcctgcagataacgcagcgtatcgccgagacgtttaaagccgttgccagtcacaaaaccacggtataccagaccgctcatctgcgccttgatatcggaaagccccaacgccatgctcatatccacccgccctttcagacgcttattgatattgaatacggtcgtcaggatccgctcgacctgcttcgcgatatccaccacagtatcattcagctcggcgcgtaccttttcgtgcagcgcggtgaaacctgcttcgctccacaccggtccgccgttggcatctatcagcttatctaccccgcaggcgatacagtcatcaatcaactccagtactttgccgtacgggttaaagtacagccccagcttggctttattcggcaatttctcatgcagatacttaatcggtgaaggaatattgagcaacaacagacggcgtaaaccgcaccacatcgcctgttgttgttccagcggattatcaaacaatttgatagcgacgctgtcacgctcatccactaacgccggccacgccttcactttataattaccgcgtttctgttcgtagctttccggcagctcgccgaaactccagatatgcagcccgctctgctcgatgccgtcatccgccaccgccgagagcgtctcctgcactttgcctttcagcgcatttttaagctcggcgagcgaacgcccttcctgcagtttcttgtttttgtcattcaccacgcgaaacgtgattttcagatgctcgggcacctgatcccaatgccagtcttcccgatcgaccgtgacgccggtcatccggcgcagttcacgctccagagcgtccagcagcggcagctccagcggcgttacgcgacctaaaaacgcttcagcatagtttggcgccggaacaaagttgcgacgtaccggttttggcaacgatttaatcagcgcaataactaattcacggcgcagccctgggatctgccattcaaaaccgctctcgtcaacctggttaagtagcggcaacggaatatggacggtcacgccgtcagcatccgcgcccggttcaaactgatagctcaaacgcagcttaagattgccctggtgccagaagttcgggtaatccagtttgctgattttttccgcgccttctttaatcagcatacttttttcaaagttgagcagatccggcgtctcgcggctgatttttttccaccaactatcaaagtggcgggcggaaataacgtcatggctaatacgctggtcataaaactcaaacagggtatcgtcatccaccaggatatcgcggcggcgagatttgtgctcaagttcctcgacttccgcacgcaattttagattctcacggaagaaggcgtgacgggtttgccagtccccctccaccagcgcatggcggataaacaactcgcgacacaacgccgggtcaatctggctgtaattcactttgcgcgcggcgacaatcggcagaccgtagacagtaaccttttccgtcgccatcaccgcgccttgcgcccgctcccagtgcggttcgctatatgaacgtttaatcaggtgctgggctaccggttccacccattctggctcaatgcgggcagcgatgcgcccccacaggcggctggtctccaccagttctgcgaccattgtccatttcggcggttttttgaataaaccggaaccggggaaaatagagaatcgggcgttacgcgcgccggtgtactcttgtttatcggcatctttcatcccgatatgcgacaacagtcccgttaacaacgcaacgtgaatttcccggtactctgcgggttcgctgtttaccggaatccccagttcttttaccacctgacgcagttgggtatagatatcctgccactcacgcacgcgtaaatagttcagatagtcggtgcgacacagacggcggaattgattcgacgacagggccttttgttgctcgccgaggtaattccacaggttaacaaacgccagaaaatcggattccttatcatggaaacgccggtgtttctcatcggaagcctgctgcttatccactgggcgctcgcgcggatcctgaatagagagtgcggaagtaatgatcatcgcttcgcgcacacagccatgtttttgcgcttccagaaccatacgcgccaggcgcgggtcgaccggcaactgggataattgtcggcccagtggcgtcagcttatatgccgtttgctgttcgtcggcggtaatcgcccccagctcttccaacaaacgcacgccatcctgaatattgcgcttatccggcgcttcgacaaacgggaaggcggcaatgtcacccagccccagggcggtcatctgcaaaataaccgacgccaggttggtacgtagaatttccgggtcggtaaattccggacgtgacaaaaagtcatcttccgaatacagacgaatgcaaatcccttccgatacgcgcccgcaacgccctttacgctggttggcggaagcctgtgagatcggttcaatcggcaggcgctgcactttagtgcggtagctgtagcggctgatgcgcgcagtgccaggatcgatcacatacttgatacccggcaccgtcagcgaggtttccgccacgttagtcgccagcacgatacggcgtccgctgtgcgactggaaaacgcggttctgttcgctgttcgacaagcgtgcatacagcggcaacacttcggtatgccgtaagttcagcttgttcagggcgtcggcggtatcgcggatttcccgctctccgctcataaaaatcagaatatcgccgggactttcacgccccagttcatcgacagcatcgaaaattgcctgtagctgatcgcgttcagtgtcgtcagcctcttccacaatggggcgataacgaacttctacgggatacgttcggccagagacttcgataatcggcgcgttattaaagtggcgcgagaagcgttccgggtcgatggtcgcagaggtaataatcactttcagatcggggcgacgcggcagaagttctttcagatagccgagcaagaagtcaatattcaggctgcgttcatgcgcttcatcaataatgagggtgtcatactgcatcaatagcctgtcctgctggatttccgccagcaggataccgtccgtcatcagtttgaccatggtgttgctactgacatgatcgctgaaacgaactttatagccgatgcagccgccaggctccgtttgcaactcttcggcaatgcggttagcgacggtgcgcgccgccagacgacgcggttgagtatgtccaataagtcctttaattccgcgtcccagttccatacaaattttcggcaactgggtggttttaccggaaccggtttcccctgccacgatcaccacctgatgatcgcggatcgcttccagaatgtcctgtttcttctggctaacaggcaaattttgcggataagtgattgaggggcgcgccgcttcgcggagggcgacctgcgccgcagcctgttcaatttctttcgccatcgtctggaaaatggcctgttgcgcatcaggattttttactttctttacgccatgcaggcggcgcgcaaagcgctgtttgtcgcgcagcatcagtgcatccagccgctgctgtaacacctgaagcgtcaacgtagattgttcagtcataaagctcttgggcaggattctgcctgtttaaaatcgttttaaatgataggtatagagtaccacattggggctttttttgcgttgttcaataatttcgaacaaagggttcgatatattgcgctatccctgcgacatatttgtgaataaagtgtcaacaagcaacggggcacgccccttcaaacacataaaaggaaacacccatgagcaaggtattagttcttaaatccagtattctggcagggtactctcagtctggtcagttgactgactattttattgaacaatggcgcgaaaaacacgtcgcagatgaaattactgtccgcgatctggcggccaaccctgttccggtgctggatggcgagctggtgggcgcgatgcgtccgggcgatgcgcctttaacgccacgtcagcaggacgctctggcgctgtctgatgaactcattgctgaactgaaagcccacgacgtcatcgttattgcggcgccgatgtacaatttcaatatcccgacgcagctgaaaaactactttgatctgattgcccgcgccggtatcactttccgctataccgaaaaaggcccggaaggtctggtaaccggtaaacgcgcggtggttctctccagccgcggcggtatccataaagacaccccgacggatttgattgcgccttacctgaaagtgttccttggttttatcggtatcaccgacgtgaattttgtctttgccgaaggcatcgcctacgggccggaagtggcagctaaagcccaggccgatgcaaaagccgcgattgacagcgtcgtggccgcttaaatatttttgcctcccgtttcgacgggaggtgacttcttaggtttgtagcgcaaatatcctaccacgccgctactgccgccatcgctgggatgcgttaccccatcattgacttcaacgcaggcgaaatcaaaaggcgacatattttcgatgcacgccacattgaccccatattgatcgggattggatcgacgctgatgaaaagtatatatcccgcataccgaacagaaaaaatgcaccgccttgcccgtattgaagcgatattcggtaagcttatcctgcccttttagcactttaatacccgacagcggcgcagacactgccaccgctccgcgcatcctgcaaaaggaacagttgcagcgcctggcggtatgaaagccatcgctaagttgaacggtaaacacgacgctgccacaatggcaggcagcagataatttttcagacgtcatacctggttactctcgcgaatagtgataccagccaacagtatagaaatagccttccggttcgcctaatgtaaatacgaccttcgtattcagaaattacccatataaaaatgcattttgcggtaaaaaaattgtcgggaagcggttatttacgcatccatttgccattaattccctggacatattctcccggcctggcgcgctcaaccagtttttgccctgccatcttcgccacctcgtccacgggaagatgattgctatccgctaactgctgataactggcgcggcgggcatgattaatatcaagcaccagtttctgggtttcggcatcattctttaaggccaccagatagccattcagcgtttccccgacccggccctgcgtgcgcgcttcgtccagggttaaggcccacacagaaggtgtgagcaagctcagcgtcagcacccatagtattaaatactttttcattatggcctcagaatagatcgctgcgtgatttcaggagttcttcaacgtctttatcgactttgatatgtatttcatgctcgatctttacattcatgttgatggtaatcggctgttccggcgcggcgacttcaatacgtggcgtgcaccccaccacgataaatgacgcaagcgctgacagcatggcaatactcattttcattatttatcctcacagtccttgtctttccggcaaggaggttgcggcaacgctgtattttgttcaagccatgcctgtaaattgtcgccaaaacgcaaactgcgccacagcgtaaacacattttcttcatgggtatagttcaagttaacgatcgcggttttaccatctacccggcttttgccggtaatagccgcctgcatcgttagtacgcccaggttatcaacgttaattttcgtccacgaatgcgtaatctccatataacgtagccagttgatcgccgagcctgccgtgacattatccttcaccaccgcatccgcagtatctttatcgatacgcaacgtcattggcccaggattcgtaagccagccatctttgattatccatttttcattgttcagccacagcggcagcgcgccgctgaccggaccagacatggcgaattgctttggatttatggcgctaatcaattcgctggatgaaatattttgcacccgcaaaagcgccgggtcgtgctgcggcattcgcaactgtttcataatgatttgaccgcccagcacgtctacgctgacatcgcttagcagtaatggattcgactcgctccagggataaccgccctgtaaatcagcggtgatatttttcgccgtgacctggttaactatcccggcgatacgcagcgagatgggcccgcgcgtccccaattgccacgcgccgttgtggaagcgaaatggcagaatgaaatcgacgccgttgattttgttatcaggcatccaggcgctgccgccttttaacacgccgtgtccacctgcttcaaatccctgcccctgcgcagcggaaaaagccacctgcgcatacagtgagccttcgcgcagcgtcattttccagtccggtggaagcaacggctggaaaacgataagcgactgcttcggccaccaggcctgtccacgaaggcgttcgccatcccagcgcccattcagccgtaccggccctatcgcccccgcccgaaggtcgcctttaaactggaacagggttggctctcgcccttcaacgctaaaattaagggtagaaggcggcagcacgctcccactggtaaatacggttttccccgccaccagagacagcgcgccctgtagcgacggcgttgtggcgtcgcgaacccagacaataggtttattcagcgccagtcttggcgatgtgacggtcattgcgccatagtgcaactgatcaaaaccggtggacaaactggtcaacctgatggtgttatcatgccattcgccctgtccggcaatatcccagtgggcgcgcattggcgtaaagcttccttgcccccaatagcgccaccgccagcgaccagcatcagggagaaaatcattggccaggccatcaagatgaagaacgaaatcgcccatctcattttcgtgcgcccgtaaaatagcctgtaatcggccatcaacgccgcgcggcgtcaccttaacgcccgccagcggccaacgaatttcatcaatatctaacgcatcaatcacccgcccgcgcgagcgtagcaatgcgccaggtgcaaaggtgagctgcggatcggccagactgccgcggaacatagcgggcaatacggcataaaagattaaatccttctgtttagcctcgccggtaagctgtagaggcatctcactgctatccatgctgagttttcccgggccgatagtcagtacagcgttcgctttaccggcatcgccctgggtcagaatattcaggcgtccactgacttgcgcattatccggcccggcttgccagttatcgatattaaaagccagacgtccgctcaaggggaatccctgatatggccagttccagcggccatcgctgatggtaagccgctgacgcgttaccgcccaggggagatcgagaatcgggtcaggattacctcgcgccatcacgatgagctgtccggcgttatcacgccactccagttccgcatccaccagcgacggttcctgcggcagacgcaaggtcgctgccgcatgaccgctgaccggcaggccatccggtaccagcggcaacacaaattcccccgccaggctaacgggaggctggttggccagcgcggcgatctccagttggctcaccgtcaatgcctgaccgcgtagctgcccttgaaattttactttttcgccctgataacgtatctgctgaatgaccggcgtcatggagatcgccagcttgccctgccattccggccagggcgcgagaatgacattatcgatgttaatccaggtattgggcagcattgactgccactgcgccagcgtacgcggcgcggcgggagaagcttccgtagcgggcagtttcgccaggcacgcggcatccagtttaaggcttttaatattcagcaaccaacggctgggatgcgtcagttccgcctgggtaatatgcgctaacgaacaatcattgaccagatagcgaagatcgggaatcactaacccatgacgtgtcaggcgtggactttgttccagagcgatacgggtaccgacgggtagccaaattcccgccagagtgggaacccacagcccgagggtcatcagtagcgtcagagggataagaatcagcagtaacagtagcgcaagggcggctttatatttacccttcatgggccattaatttcctgatttaacgaaaaattcagtcggctatctctttattttggcatgattgcccgtacatagcctaatagttcatgttgcaggggcgccctccggctatttgaggcgttgtggagaatgataacctaaaattattcattatatgtatgactatcaattatttttgattttttgtaagataattttaagcatatttgtgtgattcaaacatcactggagaaggtcatatgaaactcgccgtctatagtaccaaacagtatgacaagaaatatctacagcaagtgaacgaagcgttcggttttgaactggagttttttgattttctgctaaccgagaaaacggcgaaaaccgccaatggatgtgaagcagtttgtatcttcgtgaatgacgacgggagccgaccggtactggaagagctgaaaaaacacggcgtgaaatacatcgcgctgcgttgcgccggatttaataatgtcgacctggatgccgctaaagagctcggtttgcaggtggtccgcgtgccggcttattctccggaagccgtcgctgaacatgcgattggcatgatgatgacattgaaccgccgtattcaccgcgcttatcaacgcacccgcgacgctaacttttcccttgaggggctgaccggctttaccatgcacggaaagaccgctggcgtcatcggtaccggtaaaatcggcgtcgccgcgctgcgtatcctgaaaggctttggaatgcgtttactggcgtttgatccctatcccagcaccgccgcgcttgacctcggcgtcgagtatgtggatctgcaaacgttgtttgccgaatcggatgtcatttccctgcactgcccgctcacgccggaaaactaccatttgctgaaccatgcggcattcgatcaaatgaaaaatggcgttatggtcattaataccagtcgtggcgcgctgattgattcccaggcggctatcgaagctctgaagaatcagaaaatcggctcgctggggatggatgtgtatgaaaacgaacgcgacctgttctttgaagataagtcaaacgatgttatccaggatgatgttttccgccgtctgtcggcctgccataacgtactgtttacggggcaccaggcattcctgaccgcagaagcgctgatcagcatctctgaaaccacgttacaaaacttaagccagcttgagaagggcgaagcctgcccgaacgcgctgttctaatcctgtcgctcccctgcgctcaggggagcattttcggataacccctgaagatctatccggtcatatcattactatagtcagtgttaactatcagattacagagaatatcaatgaagaaaatcgtcacgctggtcgccctgagcatcataatgacagggtgtgtgagcagtggaaaagtgtccgtcaaacgcgagcaactggagcaccaccgctttgttctggaaagcgtaaacggtaaaacggtcaccggcccggagctcagctttggcgaggacatgacggtatccggcaaaatgtgcaatcaattcaccggcgaaggaaaactgtcggacggcgaattaaaagtgaaaaatttagcgatgacccgaatgatgtgcgcagatccacagcttaacgcgctggacggcaccctcagcgagctcttcagcaagggcgcgcaggtcgatttaaccgcgaaccaattaacgctggcgacggcagaaacaacgctaatgtataaactggcggatttagcgcactaagccattaagtgaaaagttatacgcgtcaggcgaaacgccgcgcttaataactcccgcagcttccggcggcaagcgactgttcgctacaacgtttgccgttgggtagcgcgcacataccaattactgaaccatcaagctgccgggccgctgaaagcgaaccgccaatcatagcgcaattcgcttcgccggcgctggacatcgccgctttcatccctggcgaaacatgtgccgcggttgcctgctgaacaggttcgctactgcaagccgacaataataacgcggcacatcccacccaaaacgctgcgcgcatttctctcccctctgtttattcatccaaacgacaccgccctaaataataggcagcagaaactgacgcgtcgagaggcaaagcgcgcatttatgcgcttcattaacatttattggcaattttttacgtcttttcggcaagaaatcgccattctcctcccgccagggacacaaaagcgaaaatggggcttgaagggctttgctaaaataaaaggataactacaggatgcgctcacgattatgcgtgtccctcttttttgcgcaatgtaagggtgtcatatgcaaacaattgacggtaatggcgcagtagcgtcggtggcgttccgtaccagcgaggttatcgccatttacccgattacgcccagttcaacaatggctgaacaagcggatgcctgggccggcaatgggcttaaaaatgtctggggcgatacgccgcgtgtggtagagatgcagtcggaaggcggcgcgatcgccgccgttcacggtgcgttacaaaccggttcgctttctacgtcatttacatcatcgcaggggctgctgctgatgattccaacgctgtataaactggcggggcagctcacgccgtttgtactgcacgttgccgcgcgcactgtcgccacacacgcgctttctatttttggcgaccattccgatgtgatggcggtccgccagacaggctgcgcgatgttatgcgccgccagcgttcaggaagcgcaggattttgcgctgatcgcacacagggctacgctgaaaagccgcgttccgtttattcatttttttgatggcttccgtacatcgcatgaaatcaacaaaattataccgctaacgaatgaaaccattctgaacctgatgccgcaggcggagatcgacgctcaccgcgcccgcgcgctgaatccggaacatccggtgattcgtggaacttcagcgaatccggacacctacttccagtctcgcgaagcgaccaacccgtggtacaacgccgtttatgatcatgttgaagaggcgatgaaggcatttggcgacgctacgggccgtcagtaccagccatttgaatattatggccatccccaggctgaacgcgtcatcataatgatgggctccgccctcggcacctgcgaagaggtcgtggacgagctactgatacgcggagaaaaggtcggcgttctgaaagtccgtctgttccgccccttctccgccaaacatttgttacaggcattaccggaaaccgttcgcgctatcgccgtgctggatcgcaccaaagagcctggcgcccaggccgagccgctttatctggacgtgatgaccgcactggcggaggcctttaataatggcgagcgcgaaacgttgccgcgcaccattggcggccgttatgggctatcatccaaagagttcggcccggcgtgcgtactggcggtctttaatgaactcagccgtgcgaaacccaagccacggtttacggtgggcatttatgatgacgttactaacctctcgctgccattaccggaaaataccctgcccggcagcgctaaacttgaagcgttattttacggtctgggaagcgacggcagcgtatccgccacgaaaaataatattaaaattatcggtaattctacaccgtggtatgcgcaaggttatttcgtttatgactctaaaaaagctggcgggctcacggtatcgcacctgcgcgtcagcgagaaacccattcgttccgcttacttaattgctcaggcggattttgtcggctgccaccaattacagtttatcgataaatatcagatggcggagcgtctaaagcccggcggtatctttctgcttaatacgccgtacagcgccgacgaggtctggtcgcgtctgccgcaagaagttcaggcggtgttgaatcagaaaaaggcgcgtttttacgtggttaacgcggcgaaaatcgcccgcgaatgtggacttggcgcccgcatcaataccgtcatgcaaatggctttcttccacctgacgcatattcttccgggcgatagcgccctggttgagctgcagggcgcgattgccaaaagctatagcagcaaaggacaggatctggttgagcgtaactggcaggcattggctctggcgcaggaatcgctggcggaagtgccgttgcaggcggttaatccgcatagcgcgcatcgcccgccggtcgtctccgacgccgcgccggatttcgtgaaaaccgttaccgccgccatgttggcgggcctcggcgacgcactgcctgtttccgccctgccgccggacggaacatggccaatgggcaccacccgctgggaaaaacgcaatatcgccgaagagattcctgtctggaaagaggaactgtgtacacaatgtaatcactgcgtcgctgcctgccctcactcggcaattcgtgcgaaagtcgtttccccgcaggcgatggagaacgcgccagccagtctgcattcgctggacgtgaagtcccgcgatatgcgcggccagaaatatgtgctgcaggtcgcgccggaagactgtactggctgtaatttatgcgtagaggtctgcccggctaaagatcggcaagatccacagattaaggcgattaacatgatgtcacgccttgagcatgtggaagaagagaaagtgaattatgacttcttcctcgacttaccggaaatcgaacgcagcaaactggaacgaattgatatccgcacatcgcagctcattacgccgctgtttgaatattccggcgcctgttccggctgcggcgaaacgccgtatattaaactgctgactcagttatatggcgacagaatgttaatcgctaacgccacggggtgttcctctatttacggcggtaacttaccctcaacgccttataccaccgatgccaacggacgcggcccggcatgggcgaattcgttatttgaagataacgcggaatttggtctcggtttccgtctgagcgtggatcagcaccgggcgcgcgtcatgcgtttactggcgcaattcgccgatcgcatcccggcggaattaaacgatgcgctgcatgccgaagcaacgcctgacgttcggcgtgagcaggtcgccgcattacgccaacatctgaaatcggttgcgggcgcagaggaactgttaaaggatgctgatgcgctggtagaaaaatcaatctggctgattggcggcgatggttgggcatacgacatcggctttggcggtttagaccatgtgttaagcctgacggagaatgtcaatattctggttctggatacgcagtgttactccaatactggcggccaggcgtcgaaggcgacgccgcttggcgccgtcactaagtttggcgaacatggcaagcgtaaagcccgtaaagatcttggtgtcagcatgatgatgtatggtcatgtttatgtcgcgcaaatctcgctgggcgcgcagttaaaccagacggtgaaagccatccaggaggccgaagcctggccaggaccgtcgctgatcattgcctatagcccctgtgaagaacatggctacgatctggcgctaagccatgaccagatgcgccagttaacggcgaccggtttctggccgttataccgctttgatccccgccgtgcggatgaaggcaagccgccgctggctctggactctcggccaccgtctgatgccctggcggaaacgttgcttaatgaacagcgtttccgtcgcctgaatgcgcaacagcctgaagtagctgaacaattatggcgagatgccgcattggatttgcaaaaacgctatgactttcttgccttgctggcaggaaaagcggaaaaacccggcgcagattaaaaaatattctaaggattaacctggaaacaaaaaaagcccgaacatccgttcgggcttgtcaatttatacgctggaaagcaaaggttaacgcaatggcccagcgacaaaatgaatatgtgacaataaaggcatataacaggcgtagaatatcgtaaccgaatgatattgtataatttttattttgtataatacccccaaaagcattcgtataaattatatctatttcactgcgaattatttcattaattattgaattaaacggtaacatctctttttaggtctttcctgacaaggcagaaataacgttttaacgtcaactcgctgattatttacgtggaatacgcgtaatattacgtcgccctcccctgtaggtagtccccgcagagtatcgtggagcagcacctaaaatgtgacgtatgtcattgtacataaagtgcctttagggagtagaatttcagtggatacttaaacaggaggttttatgaacagaacgattcttgtacccatcgatatttcagattcagaattaactcaacgcgtgatttcgcatgttgaagctgaagcaaagattgacgacgctaaagtgcactttttgactgtaatcccgtctttgccctattacgcttcactgggactggcttattcagcagagcttcccgcaatggacgatttgaaagccgaagccaaatctcaactggaagcgattatcaagaaattcaaccttcccgcggaccgcgtgcaggcgcacgttgcagaaggctctcctaaagataagattctggaaatggcaaaaaaattaccggccgatatggtgattatcgcctcgcatcgcccggatattactacctatctgttgggttccaacgccgcagccgttgtgcgtcatgcggaatgctccgtactggtggtacgctaaatacccgagcccgcataagagagtgcgggctcaaatcaatcatcatcgcctagtgactgacactttttgaaaacagattgattacgattacgccgcagatgataagcaacatgccaataatagccggcacatccagtttttggccaagaaacaaccatcctatcaatccaataagaacaatccctaccccagaccaaatggcataaatgatacccgcagggatggttcgcattgggatggtaagacaccagaacgcaatacaatatccgatgatagtaacgaggctcggtaccagacgcgtaaaactatctgataattttaatgagatcgtggcgataacttctaccacgatggcgataaatagaaagattacagcttctttagtcatacatctcttcgttccaatatttttcgggtcgtgatgatatcttaagtaatacggatgacagaataaagacgcttttgaaccattgcatatcttgccataaaaacgtgctggcattcgtcgccgtaatccgtaccatacgcgacatacttttgcctgctggctgttgacggcaggagcgaacccggcatttatcgccagccaaatggggcatgaaactgcgcagatggtgtatgaaatttacggtatgtggattgatgacatgaacgacgaacaagtagcgatgttgaatgcgcggttatcgtaattgcaaagtttgcccccaatttgccccatttagtaccagagaactgaaataatgcaagaaattcaaaagaatacaaagaaagagcaatacaacctcaacaagttgcaaaagcgcctgcgccgtaacgttggcgaagcgattgccgattttaatatgattgaagaaggcgatcgcattatggtttgcctttctggcggcaaagatagctatacgatgctggaaattttacgtaatttgcagcaaagcgccccgatcaatttttcactggtcgccgtcaacctcgatcaaaagcagccaggtttcccggaacatatcctgccagcctaccttgagcagctgggcgtagaatataaaatcgtcgaagaaaacacctacggcattgtgaaagagaagattccggaaggaaaaaccacctgctcgctgtgctcgcgtttgcgtcggggtatcctgtatcgtacggcgactgaactgggcgcgaccaaaatcgccctgggccaccaccgcgacgatattctgcaaaccctgtttctgaatatgttctatggcggaaaaatgaaagggatgccgccgaagctgatgagcgatgacggcaaacatatcgtgatccgcccgctggcttactgccgcgagaaagatattatccgttttgctgaggccaaagccttccctatcattccttgtaatctgtgcggttcgcaaccaaacctgcaacgccaggtgattgccgacatgctacgcgactgggataagcgctatcctggacggatcgagacgatgtttagcgccatgcagaatgtcgtgccgtctcacctttgtgacactaacctgttcgatttcaaaggaatcactcacggttccgaggtcgtcgacggcggcgatttagcgttcgatcgtgaagagattcccttgcagcccgctggctggcagccggaagaagatgacaccgccttagaggcgttgcggcttgatgttatcgaagtgaaataatctgcaggcgtctcagcactccgctgagacgccatgctatcgatcattttaatagccgtacccggcatgacttgcctttgatcttcccgttttgcaactgcttccaggctttttgcgctactgcttgacgtacggcgacgtaaacgtgcattggatgcacgttaattttgccaatatccgccccgtctaatccaatatcgccggtcagcgcgcccaaaatatctcccggacgcattttcgcttttttgccgccgtcaatgcatagggtagccatctctgcggccagagggagtaacggctgccgggcgggcgcattcagccagttcagcttgagttgcagcatttctgaaagaatattcgcccgctgcgcctcttccggcgcgcagaaactgatcgccaggccgctgcttcccgcgcgcgccgtacggccaatacgatggacatgcacctccgggtcccaggccagttcatagttaaccaccagttcgagcgatttaatgtctaaccctcgcgcggcaacgtcggtggcaaccagaatgcgcgcgctgccatttgcaaaacgcaccaacgtctggtcgcggtcgcgttgttccagatcgccgtggagcgccaacgcgctttgtcctaccgcattaagcgcatcacaaacggcctgacaatcttttttggtattgcaaaataccacgcaggacgctggctgatgctggctaagcaacgtttgtagcagcgaaattttttcatgcgcagacgtttcgaagaactgttgttcgatagccggtagcgcatctaccgtatcgatttcaatacgtattggctgctgctgtacacgaccgctaatcgccgcgatggcctcaggccaggttgctgaaaacaataacgtctggcgcgtcgcaggcgcaaagcggatcacctcatcaatggcgtcactgaatcccatgtccagcattcggtctgcttcatccattaccagaatatgcagcgcatccagcgatacggtttctttttgtaaatgatccagcaggcgccccggcgtcgcgacaatgatatgcggagcgtgctgaagcgagtcgcgctgtgcgccaaagggttgcccgccacacaaggtcagaattttggtatttggcagaaaacgggccaggcgacgtaactctccggcaacctgatccgccagctcccgcgtcgggcacagcactaatgcctgtgtctggaacagagtgacgtcaattcgatgcaagagcccaagaccaaacgccgccgttttgccgctaccggtcctggcctgcacacgcacatcattacccgccagaatgacgggtaatgctgcggcctgaacaggcgtcatctcaagatagcccagctcagtaaggttattgagctgggcggcgggcaaaacattcagggttgaaaaagtggtcacaatttactctcgcggtaacgactcatagtcagcaggcgcgtatcctcgcagatccgggcgtttgatgcgacattttaatcggttcttcgtccggcggcgggtcgggcatcggctgaggacggggaagcggctcaggaatgggaacagggtcagtgggaatcgggtccgacaaggacgagtgtagatataataaggtcaaaagacagctcatattaccctccagaatgtcattcagactcttaaagggtagacgcagatagtctacaggcaaaaaaaagccgactaatctaagtcggcgtcgtacgaatcaattgtgctatgcagtaattcaaaaaaggaagtaagacaatatggagcgcaacgcccatcgcttgacgttgcattcacctgcgagagagatattgccccgaataggtagatggtttattgacttcgctcaaatttctcggcgttttttcacccgaaatggtctgaaaagcgcttttgttacaaccatttactgcgatgcaaccataaagtaacaccaccgatcaggacaactaacagaatacaaaacagagaaaagccgaaccgccatccgccgccgggaataccgcccaggttaacgccaaataaccccgttaagaaggtgctgggcagaaaaaccatcgccataagcgacatggtataagttctgcgcgccagagactcctgcatcacctgggcaatttcatccgccatgatgccagtacgcgcgatacaagcgtcaatttcatccaacccccttcccagcctgtcggcgatatcctgcattctgcgccggtgatcgtcgctcatccacggcagccgttcactcgcaagccgggcatagacgtcgcgctgcggcgccatatagcggcgcataacaattagctgtttacgtagcaatgcgaggaaaccgcgcggtgggatttgctggtcgagaagattatcttccagatcgataattttatcgtgtagctcttcaataaattcactggcgtgatcggttaacgcatcgcacacatccactaaccagccgccgcaatctacgggcccggtgccctcctgcaaatcactgaccacatcgtccagcgccagaacctttcgctgacgggtagacacaatgaatcgctcgtccatatataaacgcattgccactaattgatccgggcgttcgtcagtactgccattaatacagcgcagcgtaatgagcgtcccttcccccatacgacttacgcgcgggcgcgagctttcaccagccagcgcatcacgcacgttattggggagtaaaggcgttgaagccaaccagcgggcgctgtccgggtgggtataattaagatgtagccaacagggatgctgactatcgatcacatcattatcttcgagcggttttactccaccacgaccatccagtagccatgcgaaaacggcatccggcacgttcacatccgatcccttaatggcttccacagcgcctccacgttacaactctcatgccgttagtctagctttcgggaaaggttaagcaatctctcattttctcattgcgcaaaaagaatgacgggaacgtgcgaaaaaagcgccttagcaacaggcgcttaccaaacatgtattatcaggcctggccgcgcctggtgatggtcgaaagagatgatacatgagagtgcgacagcgcatgttcactgtaacccggctggcttaaacgaaatttgtcggttttagtctgtaactcgatcacctgcgcctttaaaacatccgaagaagcagatagcgcttcaaccattaagacattgctatgggttgcgctttccagatcgctcaacgccagggttatctggttaatgcctttttcctgctcccgcgtggtggtggaaatttcactcatcagcacgtttaattgcccggagccgccaacaatctcctgcatatttttttcagcctcctgcactatggcggccccctgccgcacattgtcatgcgtaacgtcgatcagcgccttgatactttttgccgcctcggcgctacgatgcgccagattacgcacttccccggccaccacggagaaaccttttccatgatcgcccgcccgtgcagcctctaccgccgcgttaagcgccagaatattagtctggaatgcgataccgtcaatcaatgaaataatctccgtcatctgcgaggcacagtcggtaatagaacgcatattttctgtaacccgcaccattaattcaccgcctttacgggcgcattgggttgcacaatccgcctgtatgctcgccattcgggtattatccgcattgtttttggtactcgccgccatttcatctatactggcggcagtttgaattaacgaggccgactgctgttccgtctttacggatagcgacagactgcgcgccgccagttgttcggaaagggtcattgccgtttgcgaagaggatctgatttcacgtaccaacgcggaaatattctccgacaggctattaataccggggatgagtcgcccggcgcaattattgccaaattcggagatatgaatagacaagtttcctgctgcgacctcttcaatacttttcttcacggtattaatcggcactaccagatagcaggtcatataccaccaaagcagtaatgccgagatcagataaatgatattacacgtaattaaaatagggagatcgtgcagaaaagctatttgtaaagtatccaccaaaagaaacgcacataccatgaatagaataatgcatgtcctgacgctgatatttctcaacatttttgacggcctacaaccaggataggagacaggttttatttttatagcatttcagatacctattgccattcgtttctgtgacattctccatattcaataccagaccatcgccatttcccttagtgcaacagataaaatcatctatattcgctatgccaggatattcatccatccatattgacaagtgatgtacttatcaccattttctgcttaatagttaagtcgaaagccagtatattttaatagacgcttaaataagcgaatgactgtttctccgtgttattaccgcggacagcgttatcgcccgttctcttgcagaatcctgagcgtttggatgaggcgttatatcaggcataaaatcgggttcgcgcgagcttgcgctggcggtcctgtccgccagcggcaacgatttaccgactacgcttcgcatggcgctcccagttatcctgtttagcctgcactgttttacgtaacgcgacataacatgccccgccgccgccatggtgcggcagcgccgaacaataagcctgtacatcttcaaactctgtcaaccagcgggccacatagcttcggacgatattggcatgcgacttcgcctctcgccctttaccatgaatgatcaggacattacgcaacccctctttctgcgcctccaggataaaacgaaacagcatttttcggcacgtttcgaccggctggcgtaacaaattgaggctggcctgctgagggtatttcccactgcgtaacttgtcgatgacaccctgctgcaatccttcccgacgaaattccagcggttcattcagaggcagaatatccagaaagcccgtcgtcaggaaattatcaagctgaagcgtgtcgatacgctggggcgttttaagattacgcgttggctgccagtgtacatcagtatggcgtttcagcggctggacatcctccatggcgtcaagaaacagcgctttatcgtcaaggttcatggttcatcctccagcgtttttgcgactgccgttatcataaccgtgccctgttataccgacaacggtttacagttatttccaataacagcgacaatgtcaggcaattaaccgcctcgccaggctctctttttctccgactacgatattactgtcgctaaatgtgttatccctgactatcttttaaggagtatggttgcgggtattcctggcatgatatcttgtctcttacgttagattaagacgatgtgagagaacggatgctgagattacttgaagagaagatagccacgccattaggaccgttatgggtggtttgcgatgagcagtttcgactgcgggccattgagtgggaacagtaccgcgatcgtatggagcaactgctaaatatccactaccgtcacgaaggctatgaacgcgtttctgcgactaaccccggtggactcagcgataagcttgcagattattttgcaggcaatctcgccgtaattgataccctggaaaccgccacggggggcacaccttttcaacgggaagtatggcaggcattgcgcgctatcccctgcgggcaggtgatgcactatggtcaactggcggcgcaactgggacgaccgggcgccgcacgcgcagtcggtgctgcgaatggtgctaaccccatcagtattgttgttccctgccatcgcgtcatcgggcgtaacggcactctgaccggatacgcaggcggcgtgcagcgaaaagagtggctattacgccatgaaggctatcttttattatgaatatacaggcaaaaagtgccttatcggtcacacttttatgtaaagcaacaacaaataaattacgtgttttcaaatagataaaaatattcatcaaacttatacttgaattattccttctccgggatagctcagacttacgcgctcaccaaaaagatgttaaaattgacaaatatcaattacggcttgagcagacctatgatcccggaaaagcgaattatacggcgcattcagtctggcggttgtgctatccattgccaggattgcagtatcagccagctttgcatcccgttcacacttaacgagcatgagcttgatcagcttgataatatcatcgagcgcaaaaagcccattcagaaagggcaaactctgtttaaagcaggtgatgaactgaaatcgctctatgctatccgctccggaacgattaagagctacaccattaccgagcaaggcgatgagcagattactggattccatttagcaggcgacctggtgggttttgacgccattggcagcggtcatcatccgagctttgcacaggcgctggaaacctcaatggtatgtgaaatcccctttgagacgctggatgacctgtccggcaaaatgcctaacctgcgtcagcaaatgatgcgtctgatgagcggtgaaattaaaggcgatcaggatatgatcctgttattgtcgaagaaaaacgccgaagaacgtctggccgcgtttatttacaacctgtcccgccgctttgcgcagcgtggtttttcaccgcgtgaattccgcctgacgatgacccgtggcgatatcggcaactatctgggcttaacggtcgaaaccattagccgtctgctggggcgtttccagaaaagcggtatgctggcggtgaaaggtaagtatattactattgaaaacagcgatgcgctggcggccctcgccggtcatacccgcaacgtcgcttaaacgtcagctaaaccattgatgttatcttctgccatatcgttaaatttttctcatttattgatctggcagaagcgcttcctctgtttcattcaccatatttgagttactctttagttacaaactgcgatgacagttgtaaggagaccctgtatggctatgtatcaaaatatgctggtggtcatcgatcccaatcaggacgaccaacccgcattacggcgagcagtttatttgcatcaacggattggcggcaaaattaaagctttcctgcctatttacgatttctcgtatgagatgaccaccctgctttctcctgacgaacgcaccgcaatgcgtcagggcgtaataagtcaacgcacagcctggatacgtgagcaggcgaaatattatcttgaagccggtgtccccattgaaattaaagtggtctggcacaatcgtccctttgaggccatcatccaggaggttatcgccggcagtcacgatctggtgttaaaaatggcgcatcagcacgatcgactggaagcggtcatttttacccctaccgactggcatttgctgcgtaaatgcccaagccccgtgtggatggtcaaagatcagccgtggccagagggcggcaaagccctggtcgccgtgaacctggcaagcgaagagccctatcacaatgctctcaacgaaaagctggtaaaagagaccttacaattggcggagcaggttaatcataccgaagtgcacctggtcggcgcctaccccgttacgccaatcaatatcgccattgagctgccggaatttgatcccagcgtgtataacgacgccatcagaggccagcatttactggcgatgaaagcgctgcgccagaaattcagcatcgatgaaaaagttacgcatgtagaaaaaggcttgcctgaagaagttatcccggatcttgccgaacacctccaggcggggatcgttgtgcttggcaccgttggacgtaccggactctcagccgcgtttctggggaacacggccgaacaggtcattgaccatctgcgctgcgacctgttagtcattaagcctgatgagtatcaaacaccggttgaactggacgacgaggacgattaatccctcttgcgtcctgccggatggcgctgccatccggccaataccctattcctgttactcatctccgccgaggaaatagatccccaaaggaatcgccagcagaatagtgaacaccagactgtaaacgaaaatcattgccgactgaatggcatacatagagcttgtccactcggacagtggaatatgatactgctcaatcacaccgccgatagtcgcgcgcgttaccaccgatgccgcaacgataaacactgccagcaggcataacagaaattttttccccttcgccgatttcagcttcatcatgatcatagtattgtcctttacagatgacttttttacctgatagcaacaataccatgacaatcgcgcgatgtctgctctataaaacgtgacattgtatttacataaaaagtaaaccgctgagattaaagctgatagcactatttcttctttttacttatcgatgatctacgcgtttatcctgggtaaaatacctgttaatcaggtcattctgagctgttatcgtaggaaggagcggaaaacaataatgttcactgaattttttctcaaaaacgcatttaatctggcgatacttttcagttgcggtatggcgttgctggtcgtgagattttggctcagccgtaacgtacagtggaagaaaggattcacgttccatgcggcacagttttttatttatgcaattattattgggaccatcgggagcatcctgaataatgctattgaagattataatttgcgttttatctcttccggggtcattgattttatctgcacctcgctcattgcgcttattctgacgataaaacttttcctgattattaaccaatttgaaaaagcacaggtcaataaaggtagagatgtcaccagtacccgtattctggcacgggtcataaaaataaccattattgtcgcgattgtcttactgtatggcgaacattttggcatgagtctgtccggtctgctgacctttggcggtatcggcggtatcgctgttggtatggcgggcaaagatgtcctgagcaattttttctccggtattatgctctatttcgatcgccccttcagtatcggagactggattcgttctcctgacagaaatatcgaaggtacggtcgccgaaatcggctggcgaattacgcgaattaacacattcgaccaccgcccgttgtacgtgcctaattccgtcttttcatccattagcgttgagaatccgggacggatgaccaaccgtcgaataaaaacggttattgggttacgttacgaagatgccgacaaaattggcctcattgttgacgctatcagaaacatgttgcaggcgcacagagatatcgatcagaaacagacgctgttggtctattttaatgaattcgccgactcttcgctgaatattatggtgtattgctttaccaaaacaacagtatggcaggaatggcttgccgtacagcaggatgtttacctgaaaattattgcgattgtccaggaaaacggcgctgacttcgccttcccaagccagacgctctatatcgatgacccggaggccgcgcctgcgacaaaataaaagatagccggtgcccgataagtgttatcgggcaccgaggcttccctgtccggatggcgggttgttagcgccttccttacggtgatcaacggctcttttcattcaccgtcatggtaaattcaagcacctcattagtgtcgttaacgtaggcatgaggcatgtcggttctggctacagcggagcagccctcccgaataataaagcgtctaccgtcgactgttaatgtcagtgttccctgattaacaaacagtaattcacaggtgtctgccggatgccctgccgattcaaactgttcaccaggatgcattatccattgccagagttccagcatatccggcccgctggttcccgccatcagttttgcgctgccgcctttctcgccgcgccacaacaccggaatagcatcccggtcgataagatggaccatcggctcgctggcgacgttgacaacatccgccacggacactcccattgccgccgcgatcttacataacagcgcaatgcttggattggctttacagccttcaatttccaccagcattcctttactgacgccggaacgccgcgcaagctcatccagcgacatctttttttggctacgaaattgtttgatacgttgggaaacagcttcatttattgtgctgacgtcggcgcccgccgtggtcgataagttgacttttttggtcattggtcgatatcatagaataaaatagtcattacaggattatgcgatgtcttctatgttaccgtcaatcagcccggaactggcccgtatcgctcccggctttcgtgcattaagtattaatgttattgccgctccgattcgcgatgcgcaggtcggagaaatcgcgctaaaagaggcctgtcaggccgtaattaacggccaaccggcgtgggcacaggcgcatatagacgcctggaatacggtgcttaaagcattcggcgcaaaaccaaagcgcaccccctgctcggctgaagcgctacgaaaacgcgtgttgaaggatggaacaatggcggcgctggatccggtcgttgatctttataacgcggtgagcctgcgctatgccgtaccggtaggcggcgaaaatagcgcggcttattgtggatcgccgcggctggttttcgcagacggtagtgaaacatttgatactctgaaagaaggacagcccgccaccgagtcgccagaaccgggcgaagttatctggcgcgatgacagaggcgtcacctgtcggcgctggaactggcgtcagggagtacgtacccgactaagcgcttcagataaagcgatgtggtttatccttgaaagcttgccggaaatgccggttgatgaattgtacgcggcaggaaacatgctgactgacggccttgaaaaaatgatgccaggtttacgttttgaatccacgttgataggtgtttgattgatattgcgtaacaggagaaataccatgtcgctgtttctgacaagttttattttcgaaaaaaaagagtacgacgaagagttttatcaactggatggctgaattgagcgctatacgcagtctgttgatggctatattgggatggaaagctataccgatgccgccagcggaagaatagttaacaattattactggcagacccgcgaatcaatggagctattgataaataatttacagcaccagcaggccaaatcacaaagtcataagtggctttccggttaccagacgattattgcagaaattcaggggtgccataacgttaacctgccccatccgctggcatcattttcagttccttatgcgtaatgcaatagtatatatattaaatgtgagggcacacaagagaatgcctgcgcccctgcattgccggttattcggttctctgtgcaggggcggtgctgatataagtgattagtaaacaggaagatgagtgatatctcgtggtacactaacacgcgtaaccacattgttttcatcgcactctatcaacgctctggcaaaaatactgagctcattaattttcagcccggaattatccaaaaactggcggcaagcgtagtcagaaacaaaaattatgccgggatgaatatcatgttcccgaataaaacgggcctgagcaaatggcgtatccatactcagcacatataccgcccgggttgagtggctacccgctgatttaaggcggtcactatagtcttttacctgccattcacaaactggcgtatccagtgacggaacgacaataatctgcttttttatccccgggatacagtaacccggtaataaattatggctcaccagcccctttgtgcagggtaatggttcgccttcagccagtataccgggtttgagggtcagttgcgttttgccaaaggtgacagcgtgttcctgacccaatgagatataatcctgtgttgttgttggcgtcataaaaacttctccttttaacatttgtattattttagccataataattatttagcaatccgctaaaaaaccaggtgaacatccataataagatgatggtgataaaaagaattatattagacataataattaatatagttttatagtcttcctctgatggaaatttctttcgtgaaactcattgcatatttaaaagatatgtcaatacgttcattactatgcccacgataggttataacttgtgtatatttacctggaacattttctttcttaagagggccataatcccataagccttttaaattttcacgcgctacagtcttattaatgtgaacttcatttacaggattcccgtcgatatccttaacaatagttgtgatggtggcactttcacccggcgataatacagacttatctatactcataactgttaaatctgggcttggcgtattagatatagtttctgtttcaatatactggaactcagataccgatggcacaggcgtgtaccctgacgctgaagccatatccgtttcattataaatttctagtttaatctttgaaccccgatgttccttttggatattaaatttatgctcacatggcttttctcgtttaagtatatgctgagagttatctttattgatctgataatacgtacatactgtagtaaaagtttccgcagactgatagttattatccggatctctgatgcctacatttctggcattcctcgcaatagtcattcccggaaaaggtgtatacttttcaataaaaaagccaagtccattaaactgcaattcgtagctatcgcgaggtgttccaggcctgtgcccaacgctcggcgccgtaggaggagaaaacatcccgacggttgccgcggacgttgtcgacgaatccgccaagacgcttatcggcgcagccgccagaagcaggctatagataataagattatgtttcgacatacgcactgttgatcctttttaaaacattaattcgcatcagaggttgcggtattacccttagcatttcccttatcagaaataattctgacgcggatatatttattctgaagcgattccccattaagactataaggaagaagccaggtggcctttgtcgcacccggtacggattgccaggatttcatttcatccgagatttcccactgataattaaacgcatcagtacagtccgtgttatttacacaaagcgttctggctcgcatttctgttccgacgactggcgcagtaacgcttccgttggcctcttcagtacccggcgtaaaaagcacctccacagaagtgaccttctgcgcaatactgtctgactgcgcttgtagtagtacggtacccttcaccggatgtttatcgtctggtccgcttgcttcaatatgtaatttgagcgagcgggcatcatcgccgatatgggtcaccagaacccgttcaacccaatggccgtcacgctctgtaccaccgagcgctttaaatgccagacccggcgtatctgattgatacttaatatgacgtggtttgagcgacgcccactcctcttcagaacgctcgcgcacgtagtgccactcaataaccttcccctcttctccggcaggaagcggcgtattgatgacaaagttgccgtcctcaacctgaacatcgtcattgataacatttatccaggaacggaaactggtctcatcctgtgtcacccttaccgggatacgctcggaggtcacgcgagtaccccggctgtcagtcaccgttaaataaaggctatactcctgaccgtcggtcgccgtcagcggaagttgtggaaggataaggccgctgcccagactcccctgaagctggagtccggcgagaagctccgcatcacccgaccactcaaccttctcaaccgggtaacggctatctaccgtcgccattaatgtcaccagcgtcccggacaggcctgacaccggcattgccgtaatgcggattttgctggcctgctcccgatacgccatgacgatatcgtaattacgatcaacaaaggcacgccggttagtcgtattcgacggcgccccaacgttgcggtaatcaagctgttcatgtaacggcgtaccgaaggaataattgactctcagaccgccctctgcctgcgagccgccgttaccggcgtcccgatatcctgctctgacctcaagcaaggggacaggattccagaccagagccgcacctgcggcgcggggattccggcttaatgtaccgttacccaatagatcaactttatccccgtaatactgttcatatgtcagctctccactgaaccagggaaaatcggggagcgtgccttttgttcgcagatcaaagccatatgccggacgctcatcatgtaattcatgcgctgctgacattttccagccggtgagagggaaataatagttgccggaaaaggccagactgtctttatagacttccccgccaatgccgccacgcaagtgggaataacggatgtcggcatccagaaacgtattgacgccgagcagccatccattgacctcctggcggtaacccataccaacgttaacataggtgcggccatcgaaactgctgttgtcgtggtcgcgaaagccaagctgaccaaagagtaaagacgatgttgtttcctggacgggaataaacatatcgaactctgatgagcgatatttcgcgccatcttcaagattgacgccaccacggaaaataatctccggaaaagcgctctttatcccctcgttcaccagatgattagcggcctgccctggtaacgcctttatttttcctttggcataatcctccagcgtcccctcctgcagatgcggagaaatagacgatgccgtccccgcaatccacgactgaatttcattatcgctatcagcaatgaccggcagtggaatctgactggtaacaatggcccaggttatatatttagtaatgggttttttagaaaaaaccactgtattgtctcctgctatatccccctgcctggcagagggagtatttaaataagatgtttatttggcgataaccatcagcgacggatagcgcgtttattctccggcgtggctttcgtcgttttaggcgtaacgtggacacggaacagtttattctgctcagttcccttaataatatatttatgcttttcagcgttggtattattcagatcggtgaacttatctggtgtcccggcatccgccatctgccaggtaaagttataattactgacctcacactcagccgccgctgtggcggcacattccagtaccgcttcaagggtgccgcctaccactggagtgttggcgtcattggtaccgttgagttcatcagtcggtttaccactttcattcaccacattgatagtgacagaacgtagcttattagaaattgtaccgtctgcggcggagtcgccgctcaccccagaagatgcagaagttaataagacagtggcaggcaagaatgcactatccggcgtccccgttgccgtcttaatccggtaaacgattttaatttttttaccgcctgcatcagcaggaatggtaaaagccgtcccggttgccgccggggttccagaaggatcggcggcctcattatccaccagataccatttaatatcgtcggcattattcattttatccagcgataagggatccccatcctcatccctaataaaaacatccgctatctggagggttgaaccggtcgtcagttccccagacacttctattttttttgcattagtagttgccacaggacggtgaccaacagaagcaggtgtagcagaagaagccatatcattggctctggtattcgccaccgcctctactgagaccacggatgcacaaattgctaacgttaataaagatcttttgaagtacaaaacaattcccttttattaaatcattagaaataattacgagatttataatctcacgggctaaaaattcagggttattcaatcattttaaccgcctgtgaaattatgcccttcgccatgctaattacttagctttactggcaaaatccgatctccaagtgtaaagtttattcagaaacgtcaagcaatttaaatctttcttgttttgccagaaaagctaacaaccccccactggtttaataacacagtatatcaaacaccttaaatgtttatattttcggcttcaataaagaggaatgatgatgaaaaaagccataataatctcagtattagagcaaatagaaaaaaatcttgaagagaggattgatattgaaaagctggttgttataacaggttattcgcgaaggagtttgcaggatttttttaaagaaaagtgtggcgtctctatcggaaaatatatcagacaacgcaagttgagcagaagcgccactctgctaaagctgacctctcagtcggtcacagatatcgcgttcagaatggggtttgattcagtgcagtcctatagtcgagagttcaaaaaaacatttggcgtcaatcccaataactatcgcaaggctgatttctgggatctcagaaacctacggcctccctactggcttgactgtgatgagcattatcagttcgaaatttgtcagcttacgtcaaaagaaattttcggatttcaaacgtctcatcagatcgcaacaaatgaccttcctaaaaaagcgtcgcctataaaatggaaaatcattcatgagacgctcagaacgtggggcgaaaatgtgtattgtctctcgtcttttaagccggataataccaaagaccaggtcatcgccgtaagcagtttttttggtatggaacataattccgtcgatggaggaaaaatacccatgtcgagggtaataaaatgtggtaaatatgcaaaattccattttgttggtcataaggaacaatatcaacaattttccaatacaatatatatgtgtatattaccaaaactgaatcttatcaggagagaaggagaagatattgaatacttccatttggcatccgtccaaaagcaacagaataatgaatccattgtcgatctttattattacatccctgtactgtaatgacttcgtaccatccacgcatttcatctgaaaagtcttctcttttcagaacggtaataaaactctcagtattgattctggtaaaataagtgactattaatatagttaacgttttgaaagaattgaaaaaaataaattgcgtgcacgcgacaccggagacagattactgacagtactgtacggtgtagtgatcaggtaatattggctacagtttacggtaaaagcaaagtccatactttaactattaatgggagtatgctggccgggcggcttgcggggccttcatgctcccacatttacaatgttggtatgattacattctctctatactttactgtgctaaccttttatctcgttgagataacgtttaattaaaatgctctctttttgatgtacattataagaggagacattattcatattttcgaaatcagggcagacgatatgtatacaaccatcagaaacacagcgctagcaatggtagcttgtttttcgtatatcgcacatgccagtacccaccctcctcttattatcaccaggggagccggaggagacgcctccggagccacagtcattcatgataattggcggcatggcactcctgacctggtcaatcttaccgatatccccatagataaaatcagaccagaaaaatacagttgcatactgattattgggcaaggagctataaaagagatgcttcttgcgaacaatgcctcagcaatactttccggaaaaacggttggtctgtatagtcatctgatcgatcagaacacgctcagattacttcggcaattgcagaacaaagtgagattcaatctattttttacccgctcgcagataactctactaaaactaaggaatatttcagaatataattttttgagttctaaagtaaataatgtctggggacaagactcactagcaattgaaacagtggcacctgacaggggtaatataccggaaaaagcgcttcccctcaaaacaacagattatgtgatctggctgggtggaaactatactacttcctctggtacgcagcgtatcttcacaaacgatcagattgttgtagccctgaaaccactacataatgttatttcatcaaatgcatcgattgctattatgctttcaccacgtttttttgataatagcgtgagtaaagaagcaaaagttaaacgactgaaggcagtgcttaacaccttttcgcgaaacagggtcacattttatatgagtaaggagatgcttgctaatctgaaagaatttgatttgccagttcaactatccccttcttacgcagagctgatgcgaatgccctgggccagcgctacccggcattttgcctctgtggatcaatataacctgtttgctgatctcatacctaaagttacgccgtttcttcttgaaccgaatgatgccgatcaagctctctatgcgacggattatcttaatacccggcgtgtaagtctgacccaaaatattcttaaccacggttgtgactaaataaaacgcgcagaatccgggatagttagcaatccaaaacagaccgttagccatgagtactgtttatcttcactatacagggaacaaccaaataactgacaacacaaatcaagccgagacccggaattcggctatacaggcgctctattcaattcaggcccagaaacagtccggtacccatactggacacggcctcccaactgctttagcgcattaccagtccagcttcgatgcgccttctgtcgtctgcactatttcactggttttcataacgcgatgataaccataaacatcagcgtatttcgtcattccggttgcggtgtcaacctccggcttaccctgcgtttcaataatctctcccgtccgggtcgtcatggtataggtcgttgtacatccggctagcatcaacactgataagctaagtaccgtaataagactacatttttgcatttctcgtttccctggcacctctatttttgatgtactttaccgaataccgcaacggcaagatggatgattagggctattgctccctgtttgtccgtatctgactggctcaggttttttgatgcgctgcgttaatccggcagtaatcgctccagcacatccccagccagaagcacgctctcctgaagacgctccaggccataccccgctcgcgccttggcggaaagccccgccattagcgtccccataaagtccgtcgtccggtcagcctcttgcggataccgcatggcgacataagtgcgaatcaggttttcagcagcgatgtaaaactcgcaggcggcctctcgtgccggtttatcgttacaatgagcgccctccagaaccagacacccagtggcatcaggatcggcagcgtaacgtcttgccgcttccatcagcacatcgataaggcacttcgcggtcgggcgatcgtgacgcagaagcgccccgagcggaatcgcgtcggtcatcctgtaacgctttaatacgcgagtatacagccccaacttgctaccaaacgccgcatagaaactgggaggattgatcccgaacgcttttgtcagatccgctacgctcaccgcgtcgtagccgcgcgaatgaaataaatgttgagcggtttcaatggcttgctccggatcgaactggcgagggcgacccggcgttcggctatgttttgtagtcattactacataactccttgacggcatgatttcattacgcatattgtagtggctactacaatatcataaaggacatcctgatgacgctatttcgcaacaaatctgtactggttttagggggaagtcgtggtatcggcgcggctattgtacgacgctttagcgctgacggcgcatcggtcgttttcagctacgccggatcgcgtgaagccgccgaaaaactggcaacggaaaccggaagcatcgccatccagacggatagcgccgatcgtgatgccgtcatcagcctcgtgcgtgagtacggaccgctggatattctggtcgtcaatgcgggcgtcgctctcttcggcgatgcgctggaacaagatagcgatgcgatagatcgtttgttccgtattaatatccatgcgccttaccatgcgtcagtcgaagcagcccgcaacatgccggaaggtggacgcattattattatcggttccgtgaatggcgatcggatgcccgtaccgggaatggccgcgtacgccgccagtaaatcagccctgcaagggctggcgcgcggcctggcccgtgattttggcccccgcgggattacgataaatgtggtgcagccaggcccgattgataccgacatcaatccggaagatggccccatgaaagagctgatgcacagtttcatggcgatcaaacgacacggaagacctgaagaagtggctggaatggtggcatggcttgccggtccggaagcctctttcgtcaccggcgcgatgcacaccatcgatggtgccttcggcgcctgacggccaggcgaatatcacacggttgccgtctacgctccggcaaccgtgttagaagctgttcatgcgagaaaacatccgcaagcgccgggatcaatcgtggattttaacgccaagacaaccgcgaacaaattcaggattaaaatgcttcaccgcttcgccaacgtagcctaaatcaagggcgttgatttgagccatttcgttatccgttagtgagaaatcccagatagcaaagttctcttcaatacgttcctgtcgagtggatttaggaataaccgtgacgccacgctgcacgttccaacgcaggacaacctgcgcgatggttttttgatgggcatcggcaatcccttgaagcatgacattttcatacggtttatgtctcccgccgcctaacggcgcccacgcttcaggctgaacgttataatgcttcatggtttccagcgcggcgggttgtgcaaagtatggatgcaattcgacctggtttaccattggcgtaattctgacggtttcacagaagttggctaacacatgcgcatagaagttggacacgccaatggcttttagtttaccggcttcataagcgtcctccagcgcgcgccacgcgctaaaataatcacccattgcctgatgcaataaatagagatcaaaataatctaacccggattttttcagcgacgcttcaatacctgctttggccagatcgtagttagccatatcttgcacccacagtttagaagtaataaataactcctcacgggtacacagacctgtcgcgatggcttcacgaacagcgtcaccaacggcatcttcattgccgtataccgcagcggtatcgataagacgataaccgctgcgaatagcgcttaacactgactgctgacattcttctttgtcggttaccttaaaaacgccaaaaccaaccataggcattttaaggttgttacttaatattgaatattccacgctaaagcaccctttcgtcgtaaagacgccatgataagagcaaaatacaggtacaatgagtattgttaaatacgattatatttatacaaaaagttcattaataacagttgtacagattttttattgcatctaaacgttcagtgcttgctatatcctcgccgtgtagcacctgtttgataatgacttttcttatgcgtcaaaaccagtaccgtcattttgaccgtctgtgaaaaagttttctgaacaggcaatgcgatatccggaataatatttttagcgaagaggcgccggctggctcagcgccgttttgcaccagtcataaaaagcgcgtaccgcaggcggcagaaacctgttttgcggatagaccagcgcaagcggcaaatcataagaatggttgtccatgcaggtcaccagcgccccgctgtgcagatacggcgcaaccagatagctggcgacgcgaattaaccccagtccctgtattccggcctgaatataagcgtccgtatcatcgacaaccagcgtctcctgcacccgtatcgcgtaatccttcccttcacgcgtaaaaaaccagtcgatggtacgcccggtgcggtggttcaggtagccgaccgcatggtgcttttgcagatcatctaaattttcagggctaccgtaacgctcaatgtaagtgggcgatgctgctatcacccagttaaagctggcaagtggacgggcaaccagcgtggtggaatcatcgatcctgccggcccgaatcacgcagtcatacccttgaaggataatatcctccacgctatcgctggaacaaagtatcagctccagctccggatactggcgcaaaaaggccgggagcgtgggaataatgcaatgtcgggcgagagattgcggcatccccactttaaaacgccctttgggttgtgccgcccggccgggaaatgacgactccatggccgcgatatctgccagcactcttttgcactcttcgtagtaacgccgcccctctgcggtcacactaagtttgcgagttgtacgttgcaaaagttgaatcttaagccaggattccagttctttaaccactcgcgataccgttgagcgcggcacgcccagcacttcggcggctctgataaaactatgggtatccactacgcaaacatagacctgcatcgcttccagcttgtccattttccccccgccaattatcccatttatcagaacagtctaacccgtcttcggcgtcttatcgaacgcagatccctgacgtaatctctatctacaggtgaatcaacacagagaggcgcaaatgaaacaatccaataatcaggtgggtgaaaaagtattggtgctgggcgcgggacaactgggggcgtcagtgctggcgtcgttggttccggcggtcacacagcgtaatggttccgttagcgttattgtgtcagggcgatccagggataaacagagcaaacgacgttccagcattcatcaacaactggcagatgccggtgcgcggtttatcccggtcgacatcgcaggcagttcggttgcagcgttaaaagatcaattccacggttttgatacgatcatcaattgtatggggtttgtcgccggtgcgggtacccagataaaaatcacccgcgcggtactggaggcgggcgttaagcgctatttcccctggcagtttggcgtgaattacgatgtggtcggcaaaggcagtggccagccggtgtgggacgaacagtatgacgtcaggacgcttttgcgcgagcaaaacgtcacagagtgggtgattgtttcaactggtatatttacctcttttctcttcgaaccagcctttggtgtggtcaacttagccaaaaaaaccatcaatgccctcggcggatgggaaatgcaggtcaccgtcacgtcgcctgcggatattggtcgcctgaccactgaaatttatctgcatcagccgcgtatcactaacgaagtcgtctttgtcgcgggggaaacgacctcttatgcaaaactggcggaaacggtcgaacgcgtgacgcagcaaacttttacccgaggcgtattgacgctacctgacttacaggagcaactccgtttacatccgcatgacccaatgctgcgctatcgcgtcgccttcgcgcgtggtgacggtatgtggtggccgatgagtgacacctggaatgcacaacatcatctgccgacacaggatattgccgcctggctgaaaacacagcaatgagaacggcggcatcaggcgctcgcttaatccccatgccttctgccagcatcaggcggcgggcgtggctaccttgcgttaacaagaaaccagtacgcatcagtgcttcacgatatacattgtacggctataggccacatcttccgggttagtaatggggtatccctttacccacggtttaattaaccggccattggtatactgataaataggcgctataggcgcttgttccgttaaaattttctccgctgcattgtaatccgcgttacgcgcttcggcagtattttccatcgtcgcttgcgtcaggattttgtcataagtcggattagtaaagcgtgaaatattccccgtatgcgtggacgttaataaggataagaaagtcgacggttcgttgtaatcacccacccaggaggcgcgaataacatcaaaattaccggtattccggctgtcgatatacgttttccactcctggttttgcaatttcacatccacccccagatttttcttccacattgacgccaccgcaatcgcgattttctgatggttttctgaggtattgtaaagcagggttaatttaagcggcttctgcgatccgtagcctgctgcacgcagcaatgttttcgcctgggcattaagttcttcctggctcatttgttcaaacggtgaaggatcgggcgtaaatcctgccgtgacatccggtgtaaaatgccaggccggtttttcaccggtacctaagactttttccgccatcaaacggcgatcaatggtcatacttagcgccagacgaacgcgggaatccgccgtcggccctttctgcgtattaaacgcataataataagtccctaattgcggcggtgtataaacttgccctggaatatccttcaataatttctggtacatatttttagggaaagattcggtgatatcaatatcaccggcaaggtaacgtttcgtcgcagccgattcctggttaatgggtaaaaatgttactttttgcagtaccgttttcgcgttatcccagtaatgcgtattaggcacgaccaccagtttttcatttaccacgcgctctttaagaacatacgcgccattgccaatcagttttcccggcttcatccagtctttgccgctttcaacattcgctttttggaccggataaaaggcaaaactggcggtcagactggcaaaccagggcaacggcttgtcaagctgaacacgcaaagtgtgcgcgtccacggcactgacgccaagctgatccggcgtgactttaccgtcgataatggcttgtgcattagtgatgccagccagagcggcaaaccaggcgaagggggaaagcgttttgggatcaacgaggcgttgccagctatagacaaaatcctgggcggtcaccggcgttccatcggcccattgcgcatcatcccgcaacgtaaacgtccagatacgattatcattgctcttccactggctggcgacgccagggataatttcacccttttcgttctggttaaccagcccttcaaacagatcgcggatcacctgaatttcaggcagcccaacggctttcgctggatctaacgaagcgggctcatctttgatatgacgcaccagttcttgtttttctgccagtaccgttccgccgggaacatccgcagcatatgccagggaaaagctgctaaccaacagcgcacaacaggttactgaaacagaatgcctcatagaagttcctcaaagatgagttaaatgacaacgtaattatttgtttcagcagaaagaaatgcaattatcttccgccagaaagttgatatcgcgccatacaagagggtaaatagaaaccatttgataatcggcgggttttacacaacactacgatgattaccctactggtctcagcttcgggaaacgcgtatgactgtcacccgcccccgtgccgagcgcggcgcatttccgccaggcactgaacattatggacgttcgctactaggcgcgccgctaatctggtttccggcgcctgccgtcaatcgcgaaagcggcctgatactggctggcacccacggggatgaaacctcatccgtggtgacgctctcctgtgcgttacgcaccttaaatccaacccttcgccgtcatcatgtcgtacttgccgttaatcctgatggctgtcaactggggttaagggcaaatgcgaatggcattgatctaaaccgtaactttcccgccgccaactggaaagcgggtgagacagtttatcgctggaatagccgcgcgcaagagcgtgatgtcgtgctgctaaccggcgaccatcccggctcagaaccggaaacccaggcgctttgccagttaattcatcgactccaacccgcctgggtcgtctcttttcacgatccgctagcctgcattgaagatccacgtcgcagcgagctaggcgagtggctggccgatgcgtttgcgttgccgctggtgaccagcgtaggttacgaaacgcccggttcgtttggcagctggtgcgccgacctcaacctgcactgcattaccgccgagtttccccctgtttccgccgatgaagccagcgaaaaatacttgctggcgatgtcgaatctgctccgctggcatcctaaagatggagttgacccgtcgtaaagcgtagcgcgggctcaacatcaaccgccagccatgttgggccatcaagatcggcgaagctcacctgcggcataagcggcagcgcggcgctaatcgctcttgatgtacagagcatacagcccagcatcaggccgaatccttgctcccgcgcctccgttgccagcgccagcgcctcggtcagaccgccggttttatccagcttaatgttgatcatatcgtagcgccccgtcagggctttcagactactgcgagtatggcagctctcatctgcacagatgggcaacggatgaataaaattttccagggcggcgtcatcctgcgcgggcagcggttgctccagcatcgcgacattcagatccgccagtaactggcaacgcgccgccagcccctccggacgccacgattcattggcgtccacaatgagcgtcgcctccggcaccgccgagcggatcgccaccatacgttcgctaatcaaacgagcatcgagtttaattttcagcaacgtcgcccctttttcccatagtgccgccgcactggctgccatctgttccggcgtgcctatcactaccgtttgcgcggtagtaaaaaccggggccagcgtcacgccgagcagcccggcaaggctttgctgccgctggcgggcttgcaaatcccataaggcgctatccaccgcgttgcgcgccgcgcctgccggcaacagtttctgcaatgcttcgcgagtcagcccgttttccaactgaggcacaatactcatgatttgcgccatgaccgaggcatcactttcaccataacgtggatatggcgtacattccccgatgcctttcacgtcctcttcttccagttcgacaacgacaacatgcgcttcgcttcggctaccacgcgcaataacaaaaggcgtatgtaacggccaggtttcctcatataccttaacagatctcatctcttcccctctgatagcgccggacgcggcttgctacaaatagtatttgccgtgttaatgaataatgacttaaactggatttcgacgttaactataagtaaataggaacataattatgtcacagactgtacatttccagggtaacccggtcaccgttgccaacgttattccgcaggctggtagcaaagcacaggcttttactcttgtcgcaaaagatttgtctgacgtttccctcagccaatatgcaggcaaacgcaaagtgctgaatattttcccaagcattgatactggcgtatgcgccgcatcagttcgtaagtttaatcaactggccacagaagtggagaataccgtcgtattgtgcgtttctgctgacctgccttttgcacagtcgcgtttttgcggcgcggaaggcctgagcaacgttattacgctttccactctgcgtaataacgagtttctgaaaaactacggcgtcgaaatcgttgacggcccgctgaaaggtttggcggcgcgcgcagtcatcgtgcttgacgaaaacgacaacgttattttcagccagttggtggatgaaatcacccacgagccggattacgacgccgcgcttaatgtcctgaaggcataagccagcgcctgctggcgctacgtttgtcagtgctacaggcggtgctcttttgtcacaagaaggcctctatccggaggccttcttgttttctactcttcacccttcttctggctcagaccatattcacgcagcttattggcaatcgcggtatgcgatacccccaaccgtttcgccagtttacgcgtactcggatagctacgataaagctgggtcaggacagaacgttcaaaacgactggtaatgtcatccagcgagccttccatcgcatcctcgccgactgccaccgtcgcggcatcgtagtcaggcagcaggatatcctgcggacgcagctcatacccttccagttgcgtcagcgcccggtaaatcgcatttttaagctggcgaacgttacccggccagccgtaacgagtgaggaccgtactcagatcggcagacagtttcggtcgcggaacgccctgttcgtcggcaaaacgcgccacgaacagttcggtcaacggcataatatcctgcggacaatcgcgcaacggcggcaaattaagcgtcagaacgttaagtcgataatagagatcttcgcggaacagtcctttttgcaccagctccaccagatttttctgcgtggcgcagataacacggacatcaacatgaatttcgtgatcttcgccgacgcgacggaacgtaccatcgttgagaaaacgcagcagcttcgcctgcatacgcggcgacatttcgccaatttcatccagcagcaccgaaccgccattcgcctgttcaaagaaaccttttttaccttccggcgcatggccaaatagttcgctttctaccgcatcttccgggatcgaagcgcagttgagcgccagatacggtttcgctgaacgagggcttgcctggtgacaggcataggcgaaaagatctttgccggttcccgtatcgccggtaatcagcagcggcgcgctgagcatcgccagtttgcgcgcctgctcaacgacgtgcttcatctttgcgctcacggcaataatctgactaaacgcgctcagatcctgcgtggacaaattctgtagctgctgccccatacgaatcgtggaacgcaacatcacgaccgccccggtcaacacgtattcgtcattttcgttttgtaaatgtaccggcgtaatctccatcaggaagttttgcccgttgatcacgacatgttcgttatgggagctttgcgggttaccgtccagccagcgctgaaaattgaagccgttgattaattgtgcggcggtatggtgccgcattcgctcctggctctgggcaaaaagttgacaactcgccgggttcgccatctccactttactcttcatatccaatgagagcaccggctccggcaacgcctcaagcagcgcgctcagggccagatgttcacgttcggacggcatccagggaacggtacggacatccgttacgccggaaatacggcggatttcggccatcaggctgctgaagtcggtgaattccagctcagcaaaattaagataaattcgcccaatgggatcaatctcgattccgcgtaaatcaatgctacgtaacaccagtaaatcaagtaattcgcgggtcagaccaagtcggtcttcacaaaagacttccagacgcatgggaaccttcacctgaataatgaaccattaaatagatgataagccactattcggctggcaggaaggattctgtcaacaaatattgacagcatggcggaaaaacgggcgctgcggcgtaaagccaggccgtcagcgccatgtgaaaggtcatttctcaggcgacgacttactcttttgcagcgtctcttttagctgaccgataagctgacgacgaaaatcaccgagacgtggtttatcgttatcgatccacggcaatggtcgacatagctccatcgcttttattcccagtcgagcggtaaggagacctgcgccaatcccctgcgccgcacgcgtggacaagcgtgcggccagatcctgagacatccagtccataccgacttcacgcaccagctcactggctcccgcaaacgcgatattcagcaacaccagacggaacagacgaaggcggctgtaataaccaagttcaatgccatacagcgttgcgatgcggttaatcaggcgtaaattacgccaggcaataaacgccatatccaccaacgctaacgggctgacggcgatcatcagagtcgattccgcggcgaaacggctaatctcacgtcgcgcctgcgcgtcaagtaccggctgtaccagattcgcatacaaaccgacgatttccctgtcgttttgcgtttcgtgaatagcggcataccaacgttgtaatgccggatgtgattgatcaatccccgcctgctgcgccagtttttcgcaaaatgcgcgacctttcccgacgctatggctatgtaacagttcacgcgcttcatcgcgttcatgcgcccgctggcgcaagcgccataatcgccgccactccgtgaccaccgatcccacgccagcgccaacgatcagcgcgcctgcggcacagccgcctaaagcgacccagtcctgagtttgccaggcattcattgtccactgtacgccttgcccgaccacgctcgcgccaaacagcgccagtcctcccatcaccattttacgccacaggctgcgtttggggcgcagcgcggcatcgaccgccgcttctgccgcgccttcgtcttccgggcgctcatcgatagctgcaggcgcaaatgtacgcgactccgcttcgctgaaagtttgctgcgctttgaaggccgacgtaggttcctcctttagcggttctgcaaaatcaatacgcggttttaacggttcgctcatcgcagcttatctcctattaaaaactccagcgcagcgtccagacgaatatgcggtaacggtttatcaacatccatcacctgcggacgaaaggcttcgaactgaaaaccctgactatcccaaaacgcttgccccggcaaacgcgaaggcacttcgccggggtacacggttaacggcgcgccgtcactcaaacggtttccacgtaaagccgggattttttcgccgttgacctcaatcacaccgctggtggtcgcctgtaccgacgccagccccaggcaatccatactaatgccttcaaacgcggcattttgccaggcatcctgaataagctgctggagcaaggccaccatattggcatgttggtcgagggtgacatggtcggctttcgtcgcggcgaacagcaatttatcaatcaccggcgaaaacaaacgacgaaacagagtccgctggccatagtgaaaactttgcatcagctgcgttaaggcgagacgcatatcattaaacgcctgcggcccgctattaagcggttgcagacagtcgaccagcacaatctggcgatcaaagcgtagaaaatgatttttgtagaaccctttgaccactttttcgcaatagtagttaaagcgttcgcgcagcattccagcgttggtctgtttatccgcctgcgccagttttgactcgccgaaggcgtccacatccggccacgggaaaaactgcaatgctggcgcgcccgccatatcgcccggcaaaacaaaccgtccaggctgaataaaatgcaatccctgcgatttacactgatgcaaataatccgtccaggcggcggcaatctccgccagccggttttcatcggcgggcgccagcggatcgagcccgtcgcaaagttgccgccattttgcggcccactcagcgcgttgtccttgtaacaagccgttcatctgacgggaccagcttaaataatcctgagccagcatgggcagatcgagtaaccattcccctgggtagtccacaatctccagatacaatgtcgaggtatctttaaaatggcgcagcagcgagtcgttggagcgatagcgcaacgccagccgaatctcactgacgccgcgcgtcggtgtgggccaggcgggaggattgccataaagctgaagtatcccctcgtcgtaggtaaaacggggaataccaaaatcacgttgaggcacacgctttacgccaagcaggcgttcttcgcgtaccgcgctgagcaacggtaagcgcgcgcccgcgtggacattaagcaactggttaaccatcgccgtaataaacgccgttttaccgctgcggctcaacccggttacggcaagacgcaaatgcctgtctaccccacgattgaccagcgcgttgaattcagttttaagtcgcttcattgacatcctgttgagcctgaagagaagaaaaaataataatgagcctgcgttatagatatgtgcaaaaacgttattatcaactacccggagagatcaacaacggcgcattaagcgccgcggttagtatgagtattgagcaatagattatctatttttttactttcggcatatcaagacgactgataccgcccatattcatcgcgtgcgtataccccatatcaagcaacatttgttttgccatgcccgactgtcgcccggagttgcaatataactttaccgtatcgttcctgtctggaactaccgtttcgatatgagatttaatctccttcaatgggatattaatcgcgccctgaatatgctctcgctgatattgttccggaatgcggacatctatccagtattctgcggcataaagcggcatggctatgaataacgctaacgcaaatattccttttttcaacatacttccgtcctgacacgtaatgtatttcgcacacactatacgccagagcttaacgaaatattatgaccagactcgctatttgtaacgctgcgaaattttattcgccgccttacgaagtactggctccagcgcaaacgccagcaacatttttagcggacgacgggcgacggattttaccgcccatcccgccacgccggcaggcccgtagcgtaacgcggtcaacagaaccagcttacctgctattttgaagccgggcttcaccttctgcccggcgcgttgccagcgagtattcatcttcaccttcccgatatatcacttacagttgacggaaacgactacgcagtgtgaacgtatctgacgtgacgtagcgttccatttctcgcaaacgcttttcgcctgcggcaagctctctgtctacggtatccagcagttcgccgctggtcggctgcggtttgcctgcggccagattatccggcatagggtccagtacaaaagacagaacgatataggccactacggtaaaaaacgccagcccaaagaaaatcgacagcacgaccagaatacgcaccagttttaccggtacatcaaggtagtcggcgatcccggcgcaaacgccacgcaccatgcccttttgcggcatacgccatagttttttattcagattgattccacccattagcgctctctccagttcggatgctctgcatcaagaatgtcttccagcgcctgaatgcgctcgcgcatacgttgcgcatcgtctgtgagttgcagtaagcgttgctgctcgctttgcgacagttctccccgaccggcgcggttgctgtaatgcagccacagccaaatcggtaacacaaacaacacaaaaatggttaacgggatggccagaaatagcgcgctcatgcgttctccttacacctaaagctgatgagcgacggcgcgtatcggcgccgccattgtcattattgattatcttgcttcattttggctttcaactgcgccagctgctcgctgatttcatcatcggctttcaggttggcaaactgttggtccagcgattgctgcttaccaaaacgatggctttccgcttccgcttccatttgatcgatacgacgttcaaaggattcaaaccgcgccatggcttcatccagtttgccgctgtcaagctgacgacggacatcgcgggaagaactcgccgcctgatgacgcagcatcagcgcctgctggcgagcgcgtgtttcgctgagtttgttttccagctcgccaatctctttcttcatgcgcgccagcgtgtcatccaccagcgtgacttcctgttcaagcgtagcaattaaatcggtcagcttttgtttttcaatcaatgcggcgcgcgccagatcgtctttatctttgcgcagggccagttccgctttttcctgccactcgatctgctgagccgtagcctgttcaatacgacgggataactgtttcttttccgctaaagctcgcgcggagttcgagcgaacctccaccagcgtatcttccatctcctgaatcatcaggcgcaccagcttctgcggatcttccgctttttccaacaacgcattgatattggcgttcacgatgtcggcaaaacgagaaaaaatacccataattcaatcctcacataatgttctgataacgggcgatgccctgctatgtgattaatacaatttgcgtgccaacttttcataccactgataataaagaaattgtttcgttttacctcgccagcaaaaaaggataaagtggtgaaaaacactaacaagtggcgattttcatcatggctgaatttaaagataacctgctcggcgaggcaaaccgttttcttgaagtactggaacaagtctcccggctcgcgccgctggataagccagtgctgattattggcgaacgcgggacgggtaaagaacttatcgccaatcgactgcattatctctcttcacgctggcaggggccgcttatctcgcttaactgcgcggcgcttaacgaaaatctgctggactccgaactgtttggccatgaagcgggcgcttttaccggggcgcaaaaacgtcatcccggtcgctttgaacgcgccgatggcggcacgctgtttttggatgaactggcgacagcgccgatgctggtacaggaaaagctgctgcgggtgattgaatatggcgagctagagcgcgtcggcggcagccagccgttacaggttaatgtgcgattagtatgcgccactaatgccgatttacccgccatggtgaaggaagggacatttcgtgccgatctgctcgacaggctggcttttgatgttgtacaactgccgccgctgcgcgaacgccagagcgatatcatgctgatggccgagcactttgctattcagatgtgtcgtgagctacgtctgcccttatttcccggttttaccgatcgggcaaaagaaacgttgttgcattacgcctggccaggtaatgtccgcgagctgaaaaacgtagtcgaacgttcagtgtatcgccacggcagtagtgaacaacctttggatgaaattgttatcgatccttttcaacgccatcccgctgaaccgcccgcgcccgccctgccagcggcatccgtcacgcctgacctgccgctcaaattacgtgagtttcaactgcaacaggaaaaagcgctgctgcaacgtagcttacagcaggcgaagtttaaccagaaacgagccgccgatttgctggcgctcacctaccaccagtttcgcgccttgcttaaaaagcatcagctttagctatttctccggctaattgacgacatttacgccagttatccaccgacatttttacgtggcgggccgaagtgcgatacactttgcaaattgaacttcaaaaacttaactattatgcgcctggttttatcgtctctgatcgtgatagcgggtctactaagtagtcaggctacggctgcgactgcgcccgaacaaactgcgagtgcagatattcgcgatagcggctttgtgtattgtgtcagcgggcaggtcaacacctttaatccgcaaaaagcgagcagcggcctcatcgtcgataccctggccgcccagttatatgatcgcctgttggatgtcgatccctatacttatcgtttagtcccagagctggcagaaagctgggaagtgctggataacggggcaacgtaccgttttcacctgcgccgcgacgtttcctttcaaaaaaccgcctggtttacgccgacccgaaaactcaatgctgatgatgtcgtctttacctttcagcggattttcgatcgtcgacatccgtggcataacatcaacggcagtagcttcccctactttgatagcctacagttcgccgacaatgtaaaaagcgtgcgtaagctggacaataacaccgttgagtttcgcctgacgcagccagacgcctcctttttatggcatctggctacacactacgcttccgtcatgtccgctgagtacgccgcgcagcttagccgaaaagatcgtcaggaactgctagaccgccaaccggtcggtaccgggcctttccagctttcggagtaccgtgccgggcagtttattcgtctccagcgccacgatgggttttggcgcggcaaaccgctgatgccgcaagtggtggtggatttaggctccggcggtaccgggcgtttatcgaaattactgaccggtgaatgcgatgttctggcctggcccgccgccagccagctaactattttacgcgacgatccgcgtttacgtctgacgttgcgcccggggatgaatatcgcctatctggcctttaacaccgataagccgccgttgaataatcccgcagtgcgccatgcgctggccttatcgatcaacaaccagcgcctgatgcagtcgatttattacggcacggcggaaaccgcagcctccattttaccgagagcctcatgggcttacgataacgatgccaaaattacggagtacaatccgcaaaaatcgcgcgaacagctaaaagcgctgggcattgagaatcttacgctgcatctctgggtgccgaccagttctcaggcctggaacccaagtccgctaaaaacggcggagcttattcaggcggatatggcgcaggttggcgtaaaagtggtcattgtgccggttgaaggtcgttttcaggaggcgcgcctgatggatatgaatcacgatctgaccttatccggctgggccacggacagcaacgatccggatagctttttcagaccgctgttaagctgtgcggccatcaattcgcaaaccaatttcgcccactggtgtaaccctgaatttgacagcgtgctgcgtaaggcactgtcgtcgcagcagttggcttcgcgcatagaagcgtatgaggaagcgcagaatatcctggagaaagagctgccgatactgccgctggcatcatcactacgcctgcaggcttaccgctacgatattaaagggctggtgttaagcccgttcggcaatgcgtcttttgccggcgtctcccgcgaaaaacacgaagaggtgaaaaaaccatgattatcttcaccctgcgtcggttattgctgttgctggtgacgctcttcttcctgacctttatcggctttagcctgagctattttacgccgcatgcgccgctacaaggcgcatcattatggaatgcctgggttttctggttcaacggtctgctgcactgggactttggcgtgtccagcattaacggccagctgatctccgaacagcttaaagaggtgtttcccgccacgatggagctgtgcattctcgcctttggttttgcgctgatggtcggcatcccggtcgggatgctggcgggcgtgacgcgtagcaaatggccggatcgttttatcagcgcgctggcactattaggtttctcaattccggttttctggctggcgcttctgctcacactgttcttttcgctcacgctggggtggctgccggtatccgggcgatttgacctgctttatgaagttaaaccggttaccggtttcgccatcattgacgcctggatttcagattcgccatggcgtgatgaaatggtgatgagcgccatacggcatatggttttaccggtgctcacgctctccgtcgcgccgaccacagaagtgatccgcctgatgcgaatcagcactattgaggtctacgatcagaactacgttaaagcggcggccacgcgcggcttatcgcgctttacgattttacgccgtcacgtgttgcataatgcgctgccgccggtcattccccgtcttggtctgcagttttcaaccatgttaacgctggcgatgattaccgaaatggttttcagctggcctgggctgggacgatggttaattcacgccattcgtcagcaggactatgccgctatttccgctggcgtgatggtcattgggtcgctggttattgtggtcaatgtgatttccgatattttgggtgctatggctaaccctctgaaacataaggaatggtatgccttacgatagcgtatacagcgaaaagcgcccgccaggcaccctgcgcactgcctggcgtaaattttatagcgacgcgcctgcgatggtgggtctgtatggatgcgccggtctggcgttgctgtgtatttttggcggctggatcgcgccctatggtatcgatcagcaatttctgggctatcagctactgccaccctcctggtcacgctatggcgaagtctccttttttctggggactgacgatctggggcgcgatgtgctgagccgcctgttaagcggcgcggcgcccacggtcggcggcgcgtttatcgtaacgctggcggctacgctatgtggattagtcctcggcgtagtggcaggcgcgacgcacggtttacgctctgccgtgctgaaccatattctggacacgctgctttccatcccttcgctcttgctggcgattatcgtcgtggcatttgccggcccacatctgtcacacgcgatgtttgccgtctggctggccctgttgccgcgaatggtacgttccgtctacagcatggtgcatgatgaactggaaaaagagtacgtcattgccgcccgtctggatggcgcgacaacgctgaatattctgtggttcgccattttaccgaatattaccgccggtctggtcaccgaaattacccgggcgctgtcgatggcgattctggacatcgccgcgctgggatttttagatctcggcgcgcagcttccctctcctgaatggggcgccatgttgggggatgcgctggagctaatctatgtcgcgccgtggaccgttatgctacccggcgcggcgataacgctcagtgttttactggtaaacctgctcggagatgggattcgtcgtgcgattattgcgggggtggaataatgccgttactggatatccgcaatctcaccattgaatttaaaaccagcgaaggttgggtaaaagcggtcgatcgcgtcagtatgacattaagcgaaggtgaaattcgcggcctggtaggtgaatcgggttccggaaagagcttgattgctaaagctatttgcggcgtcgcgaaagacaactggcgagtcactgccgaccgtatgcgttttgatgatatcgatctgctgcgcctctcctcacgtgaacggcgtaagctggtcggacataatgtgtcgatgatcttccaggagccgcagtcgtgccttgatccttccgaacgcgtcggccgccagttaatgcaaaatattcccgcctggacctataaaggccgctggtggcagcgtttaggctggcgtaaacggcgtgcaattgaattactgcaccgggtgggaattaaagatcataaagacgcgatgcgcagttttccctatgaactgaccgatggtgagtgtcagaaagttatgatcgctatcgcgctggcgaatcaaccgcgactcctgatcgctgatgaacccaccaactcaatggaaccaacgacgcaggcgcaaatttttcgcctgctgacccgactgaatcaaaacagtaataccaccattctgttgattagccacgacctgcaaatgctgagtcagtgggctgataaaatcaacgttttatactgcggccagacggtagaaaccgcgccaagtaaagatctggtgacgatgccacatcatccttatacgcaggcgcttatccgcgcgattccggattttggcagcgcgatgccgcataaaagccgtctgaatacgctgccaggcgcgatcccgctactggagcagttaccgataggttgtcgtctggggccacgctgcccttacgcgcaacgagaatgcattatcacgccacgcttaaccggcgcgaaaaatcatctctatgcctgtcattttccgctgaatatggagagagagtgatatggtggaaactctgcttgaagtgcgcaacctgagtaaaacctttcgctaccggacaggatggtttcgtcgccagaccgtcgacgccgtgaaaccattaagctttacgcttcgtgagcgtcagaccctggccattatcggcgaaaacggttccggcaaatccacgctggcgaagatgctggccggcatgattgaacccaccagcggcgagcttcttattgacgatcatcccctgcattacggcgactattcgtttcgaagccaacgtattcgaatgatttttcaggacccctcaacgtcactgaatccacgtcaacgtatttcgcagatccttgacttccccctgcgccttaataccgatctggagccggaacagcggcgcaaacagattgtcgagacgatgcgtatggtggggctattgcccgatcacgtaagctactacccgcatatgctggcgccggggcagaaacagcgtctgggcctggcccgcgcgctgattttacgccctaaagtcattatcgcggacgaagcgctggcttcgcttgatatgtccatgcgctcgcagctcatcaatctgatgcttgaattgcaggaaaagcaaggcatctcctatatctatgtcacgcagcatatcggcatgatgaagcatattagcgatcaggtattagtgatgcatcagggggaagtggttgaacgcggcagcaccgccgatgtgctcgcctctccgctacatgagcttacccgccgtttaatcgcaggccattttggcgaggcgctgaccgctgacgcatggcgaaaggatcgctaagcgaaacaaataccctcagttcgattctctgagggtgttcatgcgactgcccaacagcaatgtttcaacctcttctaacgcaacggaaggaaataacgtgccctgggttgcccaaatgcctgccgtttttaacaccggcaaatagcgtgtgttttcctggccccccaccacgatcttgtcacaataacgcgccggatatgtttgacaagcagcggaaacgtcattttttcaatttgtgagacaaaaaagctgcgatcaagttttacgccgctaaaacacccgcaaactaatggcgcagcagttgcattccctacgcccaggtcgcccagccataatggattaggttgcttatgaagcgcgtgtattaaaggatcgattaaggcgttatcttgacatgaaaaatgttcagcgacctgcagctccacaaatagcatggcgtgtagtaatgcgcgaatatctttatcctgaaggacaagctgcgccataccccgatcaatatttacgatacagaataggccgtggcgtagaaaccagccatgtttggccgcgattgtccgcaacagatcaagcagaaaacggcgcttctgcgaattgtcccatgacgagataacaaactcaggatgtagcggacgagcgggcgacgatgcaaaatgggtagtgatttcgacacccagtaaatccccctccattgcccttatcggctctgccataaaaaaatagcgcatgtgaccactccacttgatcttaactccctgataatgcgcttttaacgcaaatcaatcaataaaaacgatcaatatataaaaaatgatcgaaaaaacaatatatgttaacttcatgataacttgctaattttatgttttgagaatgttcttctattgctataaggaaatttacatactacgccgaacaacgctaatacgacggcatgagaccatccgtaaagccaggtttttcttgtcaggcagaggggaaaaatcaaggcgagttaatgttgttacaccattgcgaggcatttcacccactatggcagcgcggcatcgccaaccctagtggcgagttgcatctccgctacaggctgtccagatcccccgaacgacctttaagcgaatagcaactctcaataattgatcggtaaatctgtagcgaatgtgcccccggcgattcgcagaaaagaacggaactaaatgctatttttttaattcatcctttaataccttagccacaagagtcccttcctccggcgcggctagtttaaaacgtcttcctggcgcaggtgtctgttcttcctctccgattaacgcatcaagatccgtaataagtgacttataatattcaacatcttcagtatttccttcggtctcggcccgctttaattttatcatgtgatgggccttaatttgctcttccagttgccttgttgcaagagaaacgcttcgctgttgccgtgattcttgtgataacacgatttgatcgccatccacaaagaaaagaaccccctctttaaccagaatattacctaagatatttatatcatgcatataaaccccccgggatttaagaagcgcctccgccattcgatagttatcttcatcttcaacatcgaactcctgaccttgaatatattttgaaactaaaaccgtaacgtctttaccattaatattcatgatggccgaacgagaaaaattcttgtcgtcattggccatattcaaatacttactgacacgatcaggatgacaattacgatgctccggagagttaacatccacttttattccccgctcattaactggaatcttaacaacaaagtcatcatgtaaccgatagactgtcccataacttccgctacctattttatttttttcaatatcacgcatgcgaatatttttctgaaactccggcgagttaataaacgcctctattgccgctggttgtgatgcatccgtctgatcaatagcgccgctctcataaccagacgccgtggcgggcgtggtcaggaagtctatcaaacgttgctcaaaagcctcatagattccattactacctgcctcgctcggcggtagattatcattacccaaagcggcaagcgtaatttccccgttattataattaaacatcgtttcttttaaaaaatcgacgcaacgttcagaacactccgtctcggtcactaatactccatcgtaaaacatctgtagtagtaacatattttcttgatgtgctaatacctctacagtgtatttatctattgtttcaggtctggaggcatcaataagtttaatatatccaagaagggggcgccatcgtgtacagtcttcatctcgcttcgaaaatggtcctggagagaaaggccctttaatatcgggatgctcttttttttggcacagtagattatagatttctctataatcagaaattaaacttcgcctggtaaatatattcctgaaaaaatctataaatttctcacacgttgaaaaaacatgttctcttttattatcgatgatatctcttaaatacctttctgatatctggcaactatgatttccgatctgaaatgtaaacggcatatgtctcatcctctgaaaatttattataatacacatgcaaacatataaaaacctgatttgtaactactgtaaccacctgatttccaaaatttttcatattcagtattactctgcatcaataaatagagaaaaccttcagcacctaaaaaagaaattatttttgttaagcatttgctggttaaagttacatgtccataacatcgctaataggtgaggtaaaccatttggatgaatattcaggcttcctacagaacctttatttgtctggtggaaagcgcatcgctatcgtacttgctatccgtcccggtgtctctggttggatgaggcgaaccttacaccagctggtatactgcaccgtagggcctgtcccattagactctttgatttgccagtttggccctggggagtgctcaaaatcctcagggacttcgttaccgtgtggttttagaacgtcacctgccggagatagcggcggaaaaatagcgtgacacacggggccaggagtgggatataatttcagactaatttcgaataatgttgaaaagttgctgttaaccattgttcgtaaaagcaaaaaataagcaatgactataaggattaaagctatgggttttctttccggtaagcgcattctggtcactggcgtggccagtaaactgtccatcgcctacggtatcgcacaggcgatgcaccgcgaaggagctgaactggcgttcacctaccagaacgacaaactgaaaggccgcgtagaagaatttgctgcccagctgggttccagcatcgttttaccgtgtgatgtcgctgaagatgccagcattgacgctatgtttgcggagctgggtaacgtttggccgaaatttgacggttttgtacactcgatcggtttcgcgcctggcgatcagctggacggcgattatgttaatgcggttacccgcgaaggctttaaagtcgctcacgatattagctcttacagctttgttgccatggcgaaagcctgccgcaccatgctgaatccgggttctgcgctgttgaccttgtcttatctgggagcggagcgcgccatcccgaactacaatgtcatgggtctggcgaaagcctctctggaagccaacgtgcgttatatggcaaacgctatgggaccggaaggggttcgcgtcaacgccatctctgcgggtccaatccgcacgctggcggcgtccggtattaaagacttccgtaaaatgctggcgcattgtgaagccgttacgccaattcgtcgcaccgtgaccattgaagatgtgggtaactcagcggcgtttctgtgttccgatctctcggcaggcatttctggcgaagtcgtccatgttgacggcgggttcagcattgcggcaatgaatgaactggaactgaagtaagcgcattaagtttattagcgggcggcacggctgtgctgccccattcccctcactcaccactcatctcgttatatagcgttctgatatttgttatcacctaacaatctttcatccctttcccgcatacgccaggataatccagcataaacgatccgacgccgaatcattatcgatcgccatttcatcctcgggaaaccctatggaacaatgccgaaaagcgggtaaaagccactggtatcatgaaacacaatccactatgtcgtcacaaaccccgctttcgctaatgccggaagccgcgtatgttaacgatcgttttttactggatttaacggtagcagaaaccgcgttgacgccttttgagtcatggttaaagcccgctcgccagttggcggatgtcttatttccccgcacggttctcaacgaccggcttcatacgtttagcgcctatgaacgtatgagcaccgcgctgaccgccgctcaggtatttggggttcagcgtttgtgtcgctattatgccgcgcgtctggcgccgctacctggccctgacgcctcaagagagagcaatcaacggctggcgcaaattacgcaatacgctcgtcagcttgccggctccccctccgttatcaatacgcgggcccgcgaacagcttgcagaggtgggattaaccgcccgggataccgtactcatcaatcagatcattgggtttatcggttttcaggcgcgggtagcggcgatatttcaggcgttttgccgtctgcccgtgcgcgaactgcccggccaggagatgcagcgctttgccagggccgcgcggtttcaaaacccccagacgatatggcggcccgccgccagtctggtagaatatcctccagcccataccaaagttcggcggcaatattcgtcttcacaatgccaaatgatggcgccggtactcatgcgcgatccgtcttcattcgcgttactcgaacgcatactgaccagcacattacacactgcatcgcccccttctttacttccacttatcacgctcctcacatcacgtatcaacggcagcgccgcctgctttaacgaacaggcaacccaacctggcgcgtggcgtcgcgctgtcatcacgttacgccaggaagacgacgacatcgctcgttgggaacttgagcctgcgctgacacaggcgatacaatgactcaccagagcgcccgatcgctttagcgccgcgcattttttcccgctactcaccaggggagtttcatcggagcaggccattaatatgttaggctggtgcggcgtgtgcggatggttaaatcgtttaaaaatcgcgttgggcgaaacctattaactcatccattactgaaagagcgcttgctgcgccaggcagaatcgcgtaaaactgtcagccgctcttttggctacgaaaatagacgaatatgtttcaggacaacccgctgctagcgcagcttaaacagcaactgcattcccagacgccgcgcgctgaaggggtcgtaaaagccacggaaaaaggctttggcttccttgaggttgacgcgcaaaaaagctatttcattcctccgccgcagatgaaaaaagtgatgcatggcgatcgtatcgtcgcggtcatccacacggaaaaagaacgtgagtctgccgagccggaagaactgatcgaaccgttcctgacgcgttttgtgggaaaagttcagggtaaaaatgaccgcctgtccatcgtgccggatcatccgttgctgaaagacgcgattccctgccgcgccgcgcgcggcgttcagcatgagttcaaagaaggtgactgggcggttgccgaaatgcgccgccatccgcttaaaggcgaccgttcgttttacgccgatttaacgcagtacatcacctttgccgacgatcactttgttccctggtgggttacgcttgcccgccacaacctggaaaaagaagcgccgaacggcgtagcgacggagatgcttgacgaagggctagagcgtcaggatctgaccgcgctgaatttcgtcactatcgatagcgccagcactgaagatatggatgacgcgctatatgctgaggaattagcggacggcagactccagcttacggtggctatcgccgatcctaccgcctggattgccgaaggcagtaagctggataacacagcgaaaattcgcgccttcaccaactacctgccgggcttcaatattcctatgctgccgcgtgagctgtctgacgatctgtgttcgctgcgcgccaacgaagtgcgtccggcgctcgcctgtcgcatgataatcgccgcggacggcaccattgacgatgatatcgccttttttgcggccaccatcgaatcgaaggccaagctggcgtacgacaatgtctccgactggctggaaaataacggcacctggcagccggataacgaaggcattgcccagcagattcgtctgttgcaccgtatttgtctaagccgcagtgagtggcgtcatcatcatgcgttagtctttaaagaccgcccggattaccgctttgtgcttggcgaaaaaggcgaagtactggatattgtggcggaaccgcgccgtatcgctaaccgtatcgtagaagagtcgatgatcgccgctaacctttgcgccgcgcgcgtactgcgcgataagctcggtttcggtatttacaacgtacatacgggcttcgatcccgcgaatgccgacgcgctggccgcgctgctgaaaacgcatggtctgcatgtcgatgccgaagaggtgctgacgctggaaggcttctgtaaactgcgtcgcgaactggatgcgcagccctccggtttccttgacagccgcattcgtcgcttccagtcttttgcggaaatcagcaccgagccggggccgcatttcggtcttggtcttgaggcttacgccacctggacctctcctatccgtaagtatggcgatatgattaaccatcgcctgctgaaagcggtcatcaagggggaagctattgcgcgtccgcaggaagatatcacccaacaaatggcggaacgccgtcgcctgaaccgcatggcggagcgcgatgtcggcgactggttatatgcacgcttccttaacgataaggcggggacaaatacccgtttcgcggcagaaattattgacgtcagccgcggtggtatgcgcgtgcgactggtcgataacggcgctatcgcctttatccctgccccgttcctgcacgccgttcgcgatgaactggtatgcagccaggaaaacggtacggtacagattaaaggtgagacggtttataaagtgacggatgtcattgatgtcactattgcggaagttcgcatggaaacccgcagcattattgcccgaccggcagcgtaaccacgcttagctcactcaacggcctttgctgagaaggcaaaggccgtttcttttcttcttctcccttccgtcatgctctaagtttaatcttattcaagcgccccatttcttgttatttttagctggcgactatgctttttccagaatctggattacatatgaatacatagataaaacaatacgttcagccataattacccttatttataacatggctaacctttcttttcgggcacctggcgcttaaatgggatggtacgcatgatgaaacagattcaggaacaaacggcgctaaatccccttcactctcactggcgtctggctgatgaccgcaacgtgctgtatctctccccgacaggtgaaacggatgcagaaaaaacggttgagctatcgccggaacaagccgggcgtatccgggaaataacggcgattacgtccagtctgctgataacgttgttgatagaaaaacaggttaccgctgtgcacctggtaggccgtaagattaataaccgtgaatgggctggcagcctggcaacctggcctgatacgcctgccgtctcgccaacgcaggcgcaggagctctcttttgccgagcaaatcgtatcagaagccaactcagtcattgcgatactggatagtcggggaaaaatctgtcgatttaatcggttatgcgaagagtacacaggcttaaaagagcgagatgtaattggtcaaagcgtctttaaattatttatgagccgccgggaggcggttgcctcccgacactacattgagaatttttttcgcaatggcaatgcctatgaaatcgaacgctggataaagacccgtaaaggccaacgcctgttcttatttcgtaataaattcgtccataacggtagcggaaaaaacgaaattttcctgatctgcgcaggcacggatatcaccgaagaaaggcgggctcaggagcgtttacgcatactggcgaatacagacaccgtcaccggcctgcccaatcgcaatgctattcatgaatttattaatcatgctattgcctcggctggcgagtcgcaggtgggtatcgtttatctcgatctggataacttcaagaaaattaatgacgcctatgggcatatgtttggcgatcagctcttacaggccgtttcgctggcgctgttgagttgtctggaggaagatcaattgctggccagactggggggagatgaattcattgtcctcgctgcccatacgtctcaggccgcgctggaagcagtagcctcacgaatccttacccgtctgcggcaaccgtttcgtattggactcattgaagtttacacgggatgcgccattggcatttcgttggccccccggcacggacaggacagcgaaagtctcattcgcactgccgacaccgcaatgtataacgccaaagaaggcggccgcggtcagttctgcgttttttcgccggaaatgaatcagcgcgtatttgactatcactggctggatacaaacctgcgaaaagcgctggaaaacgaccagttacttattcactatcagcccaaaattacctggcgcggcgaagtacgtagcctggaagcgctggtacgctggcaatcgccggaacgcggattaattccgccgctggagttcatctcatacgccgaagagtcaggactcatcgtcccgctgggccgctgggtgattctggatgtagttcgccagattgcgaaatggcgcgataaggggattaacttgcgcgtagccgttaacttttcggcgcgacaactggccgaccagacgctttttactgcgcttaaacaggctttgtacgatctgaattttgagtattgcccgatcgatgtcgagctaacggaaagctgcctgatcgaaaacgacacgctggcgctatcggttatccagcaatttagtcagctcggcgcccagattcatctggatgattttggcacagggtattcttcgctttctcaactcgcccggttccctattgatgccgttaaactggatcaggctttcgtcagagatatccataagcaaccgctgtcgcaatctctggttagggcgattgtcgcggtggctcaggcgctaaatttacaagtgattgccgaaggtgtagaaaatgctaaagaagatgccttcctgacaaaaaacggcgtcaatgaacgacagggctttttattcgccaaacctatgcccgccgtttcttttgaacgctggtacaaacgttatcagacgaaaaaaatgcgttaatggcgacgataatagggagaacagcctgtgcagacaggcatagccctatttttcccttctcttttcagattaatttctgcatcatgaattgaaaccttttctgacattaaggatgacaaacatgtctgatatcgaagcacaacgaattgccgcacgcattgataccgtgctggatatccttgttgctggcgattaccactcggccatcaataaccttgaaatattgagagcagagctgttagatcaggttaaagacggtatctcgccatcccaggctcccgggtcgccctgggaaatctgatagcgattatttgtccgggatggccgttagcccttcccggctctctgactgtctgttgactcctcttaacgaataaaattaatactatgaactcccgacaacaatcaattttgcaaatggtggttgataaaggccagatgagcgttgctgaactggcgaaaattaccggcgtatctgaagtcacgattcgtcaggatctgaataccctggaaaagcagagctatttacgccgtgcgcacggtttcgccgtttcgcttgagagcgatgacgtagagactcgcatgatgacgaactacacgctaaaacgccgactggcggagttcgccgcctcgctggtcagtccaggggaatccgtttttattgaaaatggcagcagcaatgcgctattggcccggacgctggcggaacaaaaagatgtcacgatcatcaccgtgagcagttatatcgcgcacctgctcaaagagaccccttgcgaagtcattctcctcggtggaatctatcagaaaaaaagtgaaagcatggtagggccgttgacgcgacagtttatccatcaagtgcatttcagcaaagcatttatcggtattgatggctggcaggctgataccggttttaccggacgcgacatgatgcgatcggatgtggttaacgctgttctggaaaaaggctcagaagcgattgtcctcaccgacagctccaaatttggctgtgtgcatccctatcccctgggcccgctctctcgcttccatcgtgtcattacggattccaaaatttccgccagcgatcaaatgcagttagaacatgcggggctgctagtcaatgttattggctcatccgtttaaaatatttcccgatggtttgccctatggcaaatcatcctctctctaagacttttctgacatcccaattaagactatttacctgttgtaacgagcgtaacgtcgtaaaattaatattagcgaaataacaggaagtgactatcacctgcgtgatatacccctgcgcaatcaggttttacggaaaatctcttaacaggttttattttaactatagttatagtgagcttaattccgtgaatcgttaattcaggagagagtattatgtttatgacgagcaaaaaaatggccgctgctgtgctggcaatcaccgtagcaatgtctctgagcgcctgctcaaactggtccaagcgcgatcgcaacacggctattggcgcaggtgcgggggcgttaggcggcgcagtgttaacggacggcagtacattaggcaccctgggcggcgcggcggtcggcggcgtgattggtcaccaggttggaaaataatccagacgtttaaatattgaacggctcaaaataatacgtttattcttttcaggtctggattacaaaaatagacaaagttgacttttacgccacggtaatttacaaccgtggcgttttcattagccgccagctaattttactttcattcctttagcttccagcaatgattttatcaagtcgcgtttatcaccctgaatttcaataatcccttcttttactgccccgccacagccgcattttttcttcagttcagccgccagtttggttaattccgcatcattcatctcgataccggtaatcaaacatacgcctttacccttacggccactggtttgacgctgaatgcgaacgataccatcccctttgggacgaaccggcgccgttttaggttcttcaatgcgccccgtctgcgttgaataaaccagacgactattggaatcgctcattatgcctcccgtttcagtgacgcgttaatatccttcagcgtttgcgccggatctaccgattgcgtaaccgggcggccaatcaccatatagtcaacgccagcggataatgcctgttcgggcgtcataatgcgtcgctggtcgcctgcctcgctgcctgcgggccgaatgcccggcgtcactagcttaaatgcagcgccaaaggcctgtttaaatctgacagcttcctgagcggaacagaccacgccatccagcccgcattgctgcgtcaggcgcgccagccgctccgcatgttccgccggtgacaacgtcacgcccagatcgtgtagatcgctggtttccatactggtcaacacggtcacggcaatgagcaacggcgcatctttactgaatggcgccagcgcgtcgcgcgctgcggccatcattctcgccccgccagacgcgtgaacgtttaccatccagacgcccaggtctgccgcagcggcgaccgcccgggccgtggtgttgggaatatcatgaaattttagatcaagaaagacatcaaacccacgttgctggagatcccgaacgagctgtggaccaaacagcgtgaacatctctttgcccacttttaagcgacaatcgcgaggatcgattttatcgacaaacgccagggctttatcgcgttcatggtaatccaacgccacaacgacaggcgattcagtaatagcgcaggaagaagatgaagcagtaaacgtcatgaccagaccttcttgatgatgggcaccggaagtggcgcaaattggataaacggcgtgcattctacctgcggcgcagggaaattaacaggttcgattgacaacctgataagccctggtcgccgatgctagcgtcgtttcttgttttatgtcattaagtatgttgtaactaaagcgaggctttttttatatactactgcccatcaagtccgcgaataggtttaatggtcgaccatgcccggcaggacggacagtgccagtacaaggtataggcggtaaaaccgcatttctgacaacgataccgcggtttactgcgcacctgctcgccaaccatatcacgcagtaccatcaggctttctttcgctcgcccttcttccgcctcgttgagatggtaatccatcagcttatggaacacccgcatggtaggatgtcgctgtagctgacgcgtgatatagacttgagctgcgtcactaccttcacgtgcttccagaatatcggcaagcattaactcagcgccagcaccggtattctcctcaacggcgcgacgtaaaaactccgcccactcggcatttttaccgagctgttgataacaggtttgcagcatctccagcgtttcgctgaccagctctttatcctgaacgatcacacgttgcaggctttcgaccgctttggcgtaatcccctctcgccatataaacgcgccccatcatgatagacacccgggcgctatttttatctgcggcggcaccttttttcagcaacgccatcgcgcgatccatgtcgtcgttgcccatctgctgtaacgctaactcacagtaaaagtgggcgatttcgatacgctgtttatctttgcccagtttcaccagccgttctgctacttcgatcgccttttgccagtcgctggttagctgatagatttgcaagagctgctgtaacgcgcctacgcgaaattccgtttcgtcggtaagttggttaaacatatcttccgcgcggtcatataaaccggcggccatatagtcgcgccccagttgctgaacagccagtaaacgctgttcataggtcaatgaagcgctttccatgagcgtttgatgaatacgaatggcgcgatcgacttcgccgcgtgagcgaaacagattaccgagagtgagatgagcctcaacggtgcccgtatcctctttaagcatatcgaggaacagatccaccgctttatcttgttggttactcagcaggaagttaacccctgcgacataatcgcgcgacaggcggttagcttcatcctgttttgtttgttgcgcacttctgcgacccatataccacccataggcagcggctacaggcaacaacagaaataacaactccaacataaatgattattcctttacaaccgacgaatcggcagggaccgcaacgtcggttgctggcgagagcttgttttccagtcgtttaattttacgttcagcgcgggcaagggaaacgcggacccgcagccagaacaggccgcaaatcagccagccaatcgcaaaaccgacggcgaacagcacagcaagcaacgtggagatacgatactccccttgcgccagcaggtagttaaacgtcacctgttgatcattctgcgcgcccagcgtcaccgaaataacaaaaatcgccaataccagtaagaaaatgagtaaatatttcacattacttcccgttatgtggtttgcgcgaataaatcgtgtccaacttaccgcatccagccttctaaattaccattttcccgcctcgcgcgaaatggaaatgcgcccaccatcagatgatttaagggcaatagtcagaaaatcaaccgttgtcagctttcctgctcgcgttcagcaatttcttgcgcttcttcgcgaggcggcataagcggcccgcaaattcgctgcgccagccaggtcgccagggtaactaatagccaggagatgagcgtggcgaccactaaatctcgcggccagtgcattcccagaagcaaacggctgcccattacgccggtcgcccagactaacaaaaacgcgatggtgaaagtccgtctgcgcggccataacagacccacggccaaaagcgcccagctcgctgcaaacatggtgtgtccggagggaaacgcaaagcccgtctctttttgccagtgctgacgcaggaaaacggggatgttctgttgcccggccaactgctctttcactaaatgtccgcgttctgtacgctttaaagtgtagaactcatcgacgggaatatggtgcgttttttcaagccagaccacaaatggccgcggctcctgtacgcgctcctttacccatgacttcacgccctgcccgacgataatcgccccaccgagaatcgcaaacagcataatggcggcgcgcaggcgaaatcgcaggcaccataagaaccatccacaaagaatcacatgcgtgataacgccccagggtttggtcacggtttccgttatccagaatagcgtttttagccaccagacctgatgtcctggctgccactgccagcctgatacccatacggcaagcggcatgataagcaacagggcggcgcctgccgcggtgcgcctcgcaattgaaagcatggatgctccttttataagtaagtatcacaatcataactgaaaattctcgccggactggaaaattgacaaatttgtgccattcctgagcaattacgtggtagtgattaggtgatgtccgccgccttatggcaaaatagcgggatacaagccaacaggcgacgacaccgcaggcgtcagcataatctggagaaatacatgcagcttaaacgtgtggcagaagccaaactgccaaccccattgggtgactttctgatggtgggatttgaagaactggcaaccggacacgaccatgccgcgctggtttttggcgatatttcaggtaaaacgccggtactggctcgcgttcattccgaatgtcttaccggggacgcgctttttagtctgcgctgtgattgtggttttcaactggaagccgcgctgacgcatattgcggaagaaggacgcggtattctgatttaccaccgtcaggaaggccgcaatatcggcctgcttaataaaattcgcgcttatgcgttacaggatcaaggctatgacacggtggaggccaatcatcagctcggctttgccgccgatgagcgtgatttcaccctttgcgcggatatgttcaaattactcggcgtggatgaagttcgcctgctgaccaataatccgaagaaagtcgaaatactgaccgaggcgggaattaatatcgtggaacgcgttccgctcattgtgggtcgtaatccaaataatgagcattatctcgatactaaagcggccaaaatgggccacctactaagtaagtaagccaccggtattaaagcgcgggcctgcctgtttacggcaggcccgataaacggctttagttcagcatatttctaatgacatagtgcaagatgccgtcattctggtagtaagtcagctcggtggcggtatcaatgcgacagcggcaaggcaccgtttctttgctgccgtccgatctcgttaacgtcaccggaatggtcgcgccagggcgcaggttttgcagatccgcgatatcaatcacctcttccccggtcagtccaagcgttttacgcgttacgccctgtggaaactccagcggcaggatccccatcccaatcaggtttgagcggtggatacgttcgaacgactcggcgatcaccacgcggatacctaacagccgcggaccttttgccgcccagtcacggctcgatcccgacccatactctttcccggcaattaccgccagcggcgttttttcctgctggtagagcatcgcagcatcataaatcgacatcgcttccgtacccggtaaatgccgcgtcatgccaccttcgacgccgggcagcatttcgttgcgaatacgaatattggcgaacgtaccgcgcatcatcacttcatggttgccgcgccgtgatccataggagttaaaatccttccgctcaacgccgtggttttgcagatagcgtccggcgggactgtccggcttgatactgccggccggggaaatatggtcggtcgtcaccgaatcgcccagcatcgccaggatacgcgcgccgtggatatctttgactggcgcaggctgggcctgcatttcatcaaagaaaggcgacaggcgaatataggttgaatccgactgccagccgtaggtatcggacgattcaacctgaatcgatttccattcttccgtgccctcaaacacttccgcatactctttacggaacatatctgatgataccagttcaacggcgcgggcaatttcctgcgccgaaggccagatatccttcaggtataccggatcgcctttacgatcgtaccccagcgggtctgtcgcgaggttaatattcatgtttccggccagcgcatacgcgaccaccagcggcggcgacgccagccagttcgttttcaccagcggatggatacgcccttcaaaatttcggttaccggaaagcacggcccctaccgtcagatcgccttttttaatcgcggtctcaataggctccggcaacggaccggagttcccgatacaggtcgtacagccataaccgaccaggttaaaaccgagctcatccagataaggcgtaagtttggcctgcgccagatagtcagataccacttttgaccccggcgccagagaagccttgacccacggttgacgcttcaaccccagcgttactgcctttttcgccagtaatcccgccgccatcagcacgctggggttcgaggtattcgtacaggaggtgatggcggcaatgacgacagcgccatccggaagctgatatggctgtccgttcatcgtatagtcaaccggctggcgatctctttgcgcggtattcagctccagctcggcgctggcggcaaaggctttcggcacatcgcctaacgccacgcgatcctgcgggcgtttcggcccggccaggctggcctcgacatcgcccatatccagttccagcgtactggtaaataccggttcgtcaccgggattacgccacattccctgcgccttcgcgtaggtttcaaccagctcgaccagatcgtcgctacgtccgcttaatcgcatatattccagggtgatggcgtcaatggggaagaaaccacaggtggcgccatattccggcgacatattagcgatagtcgcgcgatccgccaacggcagcgaatccagaccgtcaccataaaattcaacaaatttacccacgacgccatgcttacgcagcatttgcgtgacggtgagcaccaggtcagtggcggtgatcccctcccgaagcttaccggttaacttaaagccgacgacatccgggataagcatcgacacgggctgaccaagcatcgccgcttccgcttcaataccacccacaccccaccccaatacgcccagaccattaatcatggtcgtatgggagtcagtccccaccagcgagtccgggtaagcaatccactccccgtcctgtaattcgctccagacggctttacccaggtattccaggttaacctgatggcaaatgccggtgccgggcggcaccacgctgaaacggctgaatgcctgctttccccatttcaggaacatataacgctcatggttacgttccatttccagccgcacgttttcttcaaacgcatcatcatcgccgaaatgatcgaccgtcacagagtggtcaataaccagatcaaccggcgataacgggttcactttcgacgtatcgccgccgaggcgtttaacggcttcacgcatcgctgccaggtcgacaacggcaggcacgccggtaaagtcctgcatcaggacacgggcgggccgccaggcaatttcacgatcggcatgggcatttttaagccaaccggccagcgcctgaatatcttcatcagtcacagattcgccgtcctgccagcgcaacaggttttccagtaacactttaagtgatttgggcaaacgggcgatatcgcccagggatttggcagccagcggcagactgtagtaatgatacgttttatctttggcctgcaatgtatccttactggcttctcgtagggttgacgacatagctcctccttaaatgacagggttgcgttaccctgattctccacagggttgtattaaagataacacaaacaaaatgtaacgttttgataacaacccaaattgctaaaagaggagaaacctaacaggcgagaagcgaagatgaaaaagcccgataaataacgcattatcgggctttgacgagattagacggcaatccagattaactcggcccagaacagtagcgataatataaacgcgccagtccatgaccaatactttatatttgacgttaacataggcgacaccaactgtgtttaatcaatactgagaggcgctcagcacacggttgctgcggtgtaataagacagcgttaataaaacagtaacgccaataaaaagacgaatattatttttgtgacacctcgtcagcaaaagcatcaataaatgcccgctgctgcggtgtgggcgtccagtgttgcggaacagaccgaaaaacggtcgtatccggggtgttatcatcgtcaccagattgaatcgggggcgcgaccacgcgctcgcgttccgacgtaatgctcacttagccccaccaatgccagataacaagcgctaccactacccagaacaacgcagaacccacaaaaaccgccagccatgctttacgtttgagctcagggtcgcggcgcggttcctggttttcagaaggcattactaacctcatgctatcggtatcacttatcatttcagcaccaaacaatcggtacaattaatcatcagatgagacaaatcctaaataaactttagtcaaaaatccagtcaatttacgaatcgttgccagtgaataaatcaatcttttgactcaagataactatttggaaaaagaaactggcgggacgggtaattcaacactattttgctgatcattacccgtaatacttcgagggatattgcaaaaggcggctttgtctgccatgccactacgacacaaaccgacggtgatattacttttcaggcagctttatatcctgaaacatcgcttcaatttcttcattagaacgcaacgccaccgccgtatccaccacatcacgcgtcagatgtggcgcaaaacgctggataaaatcatacatatagctgcgtaaaaaagtactacggcgaaaaccaatttttgtggtgctgtggctaaaaatatcgtgcgcgtcaatccgcactaaatcaggatcggcaagcggatcgaccgccatgctggcaatgacgccaacgcccagtcccaacctgacatacgttttaatcacatccgcatcggttgcagtaaagacgatccgcggcgttaatcctgcgcgattaaaagcggtatccagttcggaacgcccggtaaagccgaaggtatacgtcaccagcggatactgcgccagcgcttcgatcgttacggaagacgttgccgccaatggatgatccggcgtcaccactatcgaacggttccagtgatagcatggcaacatcaccagatcgtcatataaatgcagcgcttccgtggcaatcgcgaaatcggcgttccctttcgataccgcttccgcaatctgcgttggcgacccctggtgcatatgcagcgaaacgcgcgggtaacgctcgatgaagcctttaatcacgcctggcaatgcataacgcgcctgagtatgggtagtggcaatatagagcgagcctttatccggccaggtgtgctcgccggcgaccgacttaatggcatcgactttggaaagcacctcacgcgcaatacgaataatctcctgacctgcgggcgtcacctgagtcagatgcttaccactgcgggcgaaaatctggatgccaagctcatcttccagcatccgaacctgcttgctgatccccggctgggaagtatacaacccctcagcggtagaggagacgttaaggttatgattaaccacttcaacaatgtaacgaagctgctgcaatttcataatacatcatccagattagcgccatcaggccatcgtttatctgcagacttaatcgggctgctaatacgatttaataataaaaaaggtgttaactataaccactatatcatttatatctgaactgtatagccagcgcgataaaataataagcccgctatacccaaaataattcgagttgcttaaaggcggcaagggagtgagttcccagaagcatagataacgatgtgactggggtgagcgacaaatctgccgggagcagatttgaacgtcgcgtgcgacggcccgtcagggcgagcccatggatgggccgagtaatccgtagccaacacataagccactttaaatatgaaggggatataaaaaagggccgcttacgcggcccgcttgactatagtgacgacaggcaggggttatttcttgccttcaacccacttgccgtcgacgaagaacgctgaccatcccgtcgccttcccgtctttttccgccgcaacgtactgctgttttgttttgcggctaaagcgaacaacggttttattaccttccgggtcctgctgcggcgcatccgccagataacgcagtttttccggcaggcgatcgcggaaccggtacagctcctcgactaatggcgcgcgagtttcgcgtgatttcgggaacgtattggccgccaggaatatccctgcggcgccatcgcgcagcacaaagtacgcgtccgatttttcacacggcagttccggtaatggaacaggatcttccttcggcggcgcaacttcgccgttacgcaagatcttacgggtatttttacattcgtcgttagtacaggccatgtacttaccaaaacgccccattttcaggtgcatttcggaaccacatttctcacactcaacgatcgggccgtcataccctttgatgcgaaactcgccttcttcaatctcgtagccgtcacaggtcgggttattaccacacacatgcaatttacgcttcggatcgatcagatagctgtccatcgccgtaccgcacttctgacagcgccgcttggcgcgcagggcgttggtttcggcgtcgtcgccttccagcacgttcagaacttcattttccggcaccaggttaatggtcgttttacaacgctctttcggcgaaagcgcataacctgaacaaccaaggaaaacccccgtactggcagtacgaattcccattttacggccacaggttggacagtcgatgctggtcagcaccatctggttaggacgcatccccccttcttccggatctttctcggctttatcgagctgctgagtaaaatcgctgaagaagttatccagtaccgctttccactcggcctggtgattcgcaacctgatccagactatcttccatctgcgcggtaaaatcgtagttcatcaattcgcggaagttttcttccagccggtcggtgacgatttcacccattttttccgcatagaagcgacggttttcaacgcgaacatagccgcgatcctgaatggtcgagataatcgacgcataggtagacggacgaccaataccacgcttctcaagttctttaaccagagaagcctcgctgaaacgggctggcggtttagtaaagtgctgagcaggcgtcaattcaagtagcgtcagcgcatcgcccttattcacggcaggcaatgtgcgatcttcatcgcctttacgcagcgccggcatcacttttgtccagccgtcaaagcgcaaaatacgcccacgcgctttcagacggaattcgcctgcgccaacggtaagcgtagtggagtcatattgtgctggcgtcatctgacaggcgacaaactgacgccaaattagctgatacaacttctgcgcgtcagcctccatgtctttcagagactccgccatgacagcaacgtcggaaggacggatcgcttcgtgcgcttcctgagagttttctttgctggcgtactggttcgggttatccggcaggtatttcttgccgaaattatcgccaatataaccgcgcaccatgttgaccgcatcctgactcaggttggtggagtcggtacgcatataggtgatgtagcccgcctcatacagacgctgcgccatcatcatggttttcttcacgccaaagcccagccgggtgctggccgcctgttgtagcgtggaggtgataaacggcgcgccaggtttgctgctggtcggtttgtcttcacgctccagtacgctatagcgcgctttttccagcaagctgacggcggcaagcgtctgctcgcgatttaccggccggaatggcttgtcgttctgatgcgtcacctgtagcggtagtgcctcgccagacggcgtcgtcgtattagcgtcaatttcccagaactcttccggaacaaacgctttaatctcgcgctcgcgttcaacgaccagacggaccgcgacagactgaacgcgacctgccgacaaaccacgggcgatctttttccacagcagcggcgagaccatatagcctaccacgcgatccataaagcggcgcgcttgctgggcgttgaccctgttaatgttcagctcgcccggctgttcaaacgcctggcgaatggcatttttggttatttcgttaaagactacgcgactgtagcgcgcgtcatcgccgccgatcacttcccgcaggtgccatgcaatggcttccccttcgcggtcaaggtcggttgcgagatagatgtggtcggctttttccgccaactgtttcagttcagagacgaccttctctttaccgggcagcacttcatagtgcgcatcccagttgtgccacgggtcaacccccatacggttgacgagagcgccacgttcatcctttttgggctttttagccgttttggtggaggtagagtcggcgctctttttagctgctgagccactggtcggcaaatcacggatatgacccacgctggatttcaccacgtagtcattacccagatacttgttgatcgttttggcttttgccggggactcaacgatgacaagagctttacccatattcacctttacctaagttgattcttccaggaatgcgtcgcacgttgattcaccttccactggcgacgagacaacgatatatggtctctgcgtctgcggatatcaaccccttgtactggctttgtgtacgaaatgtaaccctcaggtgactgagttaacaggcttttttgcacacacgcgctatagcacgacggaattttggtcgaatgtcaagcaattctgttgccagattgacgaaagcgtcacactgtacctgataaaattcgatacgcaactttattagcatgcaaaaacaaatcttgccagtgaacgcaacatgacaaatccatcaatttcctgtgagaatatttgcccatcagaagtgctcagcgtagactaatctccttgtttaaggagtaaaaaatgcataaagagacgcaacctatcgatcgcgaaacactgttgcttgaagccaacaaaattattcgggaacatgaagacacgatggcaggtattgtcgccaccggcgtaacgcagagaaatggcgtgctggttttcagcggcgattactttttagacgagcaagggttaccgacccctaaaagcaccgcggtgtttaacatgtttaaacacctggcgcatgtgctgtctgagaagtatcacctggttgattaatccatgccggatggcgctgaatgccatccggcaatagcggtttacatcaacggcttttgtccacgctgccaccagcgcagcagcagccgatccgcgctttccgccgcgctgccggtaacacgatcgatcagttttttacgctgcatatagcgcacattcagcacctcgcgcccttccatcaggccgaggataacctcatcgctggtgttaatctcatcaaccagtcccttctccagcgcctgctgaccgtaccagtgttcgcccgtggcgacctgttcaatgtccagagccggacgcatccgctgcacaaactctttgaacagatggtgcgtttcgttgagatcttcacgaaacttctgccgcccttcttccgtattctcgcctaacaaagtcagggtacgtttgtactgccctgcggtatgcagttcaatatcaatgtctttacttttgagaaagcggttaaagttcgggatttgcgcgacaacaccaattgaccccacaatagcaaacggcgccgcgataattttttccgccacgcaggccatcatatagcctccgcttgccgcgactttatccaccgtcacggtcagcggaatatttttatcgcgcaggcgctgcaattgcgatgccgccaggccatagccgtgcacaacgccaccggggctttccagacgcacaaccgcccgatcgccgggtttcgccactgccagcaccgccgtgacctcttcgcgtaacgcattaacttcgtgagcgtccatactgcctttgaaatctatcacccatacgcgcggtttgtccgatgtcgcaatgtcccccagcttcgctttcgctttggcggctttcgcctcctgcttatgcttttttttctgcgctttatgccacagtttttgctgatggccatccatcaacgccgcagcaaggtcatccttcatctcctgatactgctcactcaaattggtcacgcgcagctcgccgcgctgacgtttgcgttgcgtagcattcacgatcagcagcacaatgacggcaatggccaccacaacggtgacgatttttgccaaaaataagccatattcagacaacaattccacgactcccaccttgattaaataacgcgacttgcgctcagtgtacaacaggcatcgaagtcagtctctcttcatccgtatgcctgttgaggaagaaaaagtatgacaagacgttcattttacggcgttatcgcccctgtctgattgaaaaaaaaggcgctttcaggcataaacccgaaaagttaacgcgaagataagacaacctggcaggacggtgcaccacaccgttgaggagtagccatgcattaccaaccgaaacaagatctattgcaaaaccgcattattctggtcactggcgccagcgatggcattgggcgggaagccgcgctcacgtatgcgcgttacggcgcaacggtgattctgctgggacgcaacgaagagaaactgcgtcgggtcgcgcagcacattgctgacgagcaacatgttcaaccacagtggtttacgctcgatctgctgacctgcaccgctgaagagtgccggcaagtggccgaccgcatcgccgcgcactatccccgcctggatggcgtcctgcacaatgccgggttactgggggaaatcggcccaatgagcgaacaagatccgcagatctggcaggatgtcatgcaggtaaacgttaacgccacctttatgctcacccaggcgctgttaccgttattattgaagtccgatgccggctcgctggtctttacgtcatcaagcgttggccgtcagggacgcgccaactggggcgcctatgccacctcgaagtttgctactgaaggaatgatgcaggtgctggcggacgaataccagaaccgttctctgcgtgttaactgcattaacccgggcggcacgcgcaccagtatgcgcgccagcgcctttccgacggaagatccacagaaattaaaaacgcctgccgatattatgccgctttacctgtggcttatgggcgacgacagtcgccgtaaaaccggtatgacctttgacgcccaaccgggccgtaaaccaggaatcgcccaatgagtgatgaacgttatcagcagcgccagcagaaggtaaaagatcgggttgacgcccgtgtcgcccaggcacaggaagagcgcggtattattatcgtgtttactggcaatggtaagggcaaaaccacggcggctttcggaactgccgcccgcgccgtaggacacggtaaaaacgtaggcgtggtgcaatttattaagggcacctggcccaacggcgagcgtaatctgctggaaccgcatggcgtcgaatttcaggtgatggcaacgggatttacctgggagacgcaaaatcgcgaggcagacaccgcagcatgtatggccgtttggcagcatgggaaacggatgctggccgatccgctgcttgatatggtagtactggatgagctgacctatatggtggcgtatgactatttaccgctggaagaggtcataagcgcgctaaacgcgcgccctggtcaccagacggtgattattacaggtcgcggctgtcaccgggatattcttgatcttgcggataccgtcagcgaactgcgtccggttaaacatgcttttgacgcgggcgtaaaagcccagatgggaattgattattaaccgtaggccggattaaggcgtttgcgccgccatccggcacaaaccctcttgtctgatgatcctcggcctatagaccgcggtagagattacccgttgttattacgcccaccggagcggcgtccgccagctatctggctgtggcgttttaccgcccgacggatctggttcgctttcatacgacgacggtctttttcgacggcaaccttcgacgaggtttccggcgggagctctaccagaccacgcagatagttcgtttgcgcgaggtcgagctcagtccagccgccgcgcggcaggcctttcggcagcgggatatcgccgtaacgaacgcggatcagacggctgacctgaacgcctaccgcttcccacagtcggcgaacttcgcggttgcgcccttccgtcagcgtcacgttataccactggttaatgccttcgccgccgctgaatttaatggtcttaaatgccgccgggccatcttccaactgtacgccacggcttaaatcacgcagtttcgattcatccacctgaccgaacacgcgcacggcatattcacgttcaacttcgcgactaggatgcatcaggcggttcgccagttcaccgtcggtggtaaacaacaatagcccgcaggtgttgacatccagacgtcctaccgcaatccaccgcgcgccgcgcagtttcggtaagcgatcaaaaacggttggccgcccttcagggtcattgcgggtacacagttcaccttctggtttgtaataggccagaacgcggcaaatttgttccgccgactctttcaccgaaatcaggtgaccgtcgatacggattttcaaaccgggagtgacttcaacacgatcgccaagcgtggcgattttaccgtcaacgctgacacgtcccgcttcaataatggattcgatttcacggcgagagccgtggccagcgcgcgccagcactttttgtaacttttcgctcatagagcttccttcaggtgtcgccttcacaggcgtcgaacaggagaatgaacggcgcgttgccgcgccattttaaggccgcgtagtatacaggcttacgcccttataagaaaggtgtaacgtcgccgacgccttcgcgcagcaccaccggggagtcattggtcaaatcgattaccgtggtaggctgttgaccgaggtaaccaccgtggatgatcagatccacctgcttctccagccgatctttaatctcctccgggtccgactcggtaaaatcgctgccaggcagcatcaacgacgtcgagagcatcggttcgcccagcgtatccaataacgccaacgcaatcgggtttgacggtacgcgcaggccgatagttttacgcttttcctgcaacagacggcgcggcacctcttttgtccccttcaggataaaggtgtaattacccggcgtattgtttttcatcagacgaaatgccacgttgtcgacgtaggagtaggtcgacaactcggacaaatcgcggcacatcagcgtgaagttgtggccgtccggcagatgacggatgcggcaaatgcgctccattgcgcctttgtcttcaattttacaaccaagggcatagccggaatcggttggataaacaataacaccgcctttacgcacaatgtcgacggcctgattaatcagccgttgctgtgggttatccggatggatataaaaaaactggctcatacttccctcactgtgatatttgcggctgttcccatgtctgccatacgccttcaacgccagcgggcagccagagtttacgccccaactcaatccacgggcagggctgatggaaatcagatccaagcgatgcccataaatgatgctgacgcgcaagcgtcgccagttgggtgcgttcattgggcgattgttggcactgcgccacttccatcgcgtcgccgtgatggtcggcaaaatgcgccactaatcttttcagccacttagcgctaaggtcgtagcgtcccggatgggccaacaccgccttaccgccagaatgatgaatgacatcaatagcttgttctattgtacaccactgcggcggaacgtaaccggttttcccacgcgcgagatattttttaaaaacatccgccatggtcgcggctttgccgcactccaccagaaagcgggcgaagtggccgcgcgtcaccgcgccgccattggccagtctcaatgccccttcccacgcgccgggaatatgggctttttccagacgctccgcaatgagccgaccgcgtgcctgacgccgctctgtctgctgcgccagaaaatcgcgcattgccggatgcgcaatatcaatattcagacccacaatgtgaatctcatgattctcccagaccgttgaaatctccacgccgggaataagattcagggccagtccggaacgtgaaatttcttctcttgccgcaggaatcgcggctgtggtgtcatgatcggtaatcgccagcgtgccgactcgcatctctaccgcacggtgtactaatgtttctggcgtcaacagtccatcggacgccgtggtatgactgtgcagatcgtaaatcactgcgtaattcgtgtcgctcaaggcggctcccatagagataaagttatgtcatgtacatcataacggttccggcaaatatactgaaataggtgttgacattattccatcgaactagttaactagtacgaaagttcacatgaagagggtatctaaaatggcagcgacatttgcattacacggttggtggcgcacttcctgatagcgggcggtgtatgaacagctgtaatcagccaaacgatacccggcccgcctgttaagcgggcttttttttgaacaaaataatgagaataaccatgcaaacaccaaaacccacgctcgaactgttgacctgcgatgccgcctatcgggaaaacccaacggcgctttttcaccaggtctgcggcgatcgcccggcaacgctgctgctggaatccgcggatatcgacagtaaagatgatttaaaaagcctgctgctggtagatagcgcgctgcgcattaccgctttaggtgacactgtcaccattcaggcgttatctgataatggcgcctcgttattgccgctactggataccgccctgcccgctggcgtggagaacgatgtcctgcctgccggtcgcgttctacgcttcccgcccgtcagcccattattagatgaagacgcccgtttatgctctctgtcggtatttgatgcgttccgtctgttacagggagtggtgaacataccgacgcaagagcgggaggctatgtttttcggcggtctgtttgcctacgacctggtcgctggctttgaagcgctgccacaccttgaggctggcaataactgcccggactactgcttttatttagcggaaacgctgatggttatagatcatcagaaaaaaagcacccgtattcaggccagtctgttcaccgccagcgaccgggaaaaacagcgcctcaacgcccgcctggcgtaccttagccaacagttaacccagcctgcgccgccgttgccggtgacgccggtgccggacatgcgctgtgaatgcaatcagagcgatgacgcgttcggcgcggtggtacgccagttgcaaaaagccatccgcgcgggcgagatatttcaggtggtgccgtcgcgccgcttttcactgccctgcccgtcgccgttggctgcctactacgtgctgaaaaagagcaaccccagcccgtatatgttctttatgcaggataatgatttcacgcttttcggcgcgtcgccggaaagctcgctgaaatatgacgcagccagccgtcagattgagatttatcccatcgcgggtacccgtccacgcggtcgccgcgccgatggtacgctggacagagatctcgacagccgtattgagctggacatgcgtaccgaccataaagagctttccgaacatctgatgctggtcgatctggcgcgcaatgacctggcgcgcatctgtacgccgggcagtcgctacgttgccgatctgacaaaagttgaccgctattcatacgtgatgcatctggtttcccgggtggtgggcgaactgcgtcacgatctcgacgcgctgcacgcctatcgcgcctgcatgaacatgggcaccctgagcggcgcgccgaaagtacgcgccatgcagttgattgccgatgcggaaggacagcgccgcggcagctatggcggcgcggtcggttacttcaccgcccacggcgatctggacacctgtattgttatccgttccgcgctggtggagaacggtatcgccaccgtacaggcgggtgccggaattgtgctggactctgttccgcagtctgaagccgatgaaacccgtaataaagcgcgcgccgtattgcgtgctatcgccaccgcgcatcatgcacaggagaccttctgatggctgatattctgctgctcgataacatcgactcgtttacctggaacctggcagatcagctacggaccaacggtcataacgtggtgatttaccgtaaccatattccggcgcagacgcttatcgatcgcctggcgacaatgaaaaatccggtgctaatgctctcccccggtccgggcgttcccagcgaggcaggctgtatgccggagctgctgacccgactacgcggcaagttaccgatcatcggcatttgtctggggcatcaggcgattgtcgaagcttacggcggttatgtcggtcaggcgggagaaatcctgcatggcaaagcctccagcattgagcatgacggtcaggcgatgttcgccgggctggcgaatccgctaccggtcgcgcgttatcattcgctggtcggcagtaatgttcctgccgggctgaccattaacgcccatttcaacggcatggtgatggcggtacgtcatgatgcggatcgcgtttgcggttttcaatttcatcctgagtccatcctgacgacacagggcgcgcgtctactggagcaaacattagcctgggcgcagcaaaagctggaaccgaccaacaccctacagccgattctggagaaactctatcaggcgcaaacactgacgcaacaagagagccatcagttgttttcggcggtcgtccgcggcgaacttaagcctgaacagctcgccgccgcgctggtgagcatgaaaattcgcggcgagcatcccaatgaaattgccggcgccgccactgcgttactggaaaatgccgccccgttcccgcgcccggagtatctgtttgcggatatcgttggtaccggcggcgatggcagtaacagtatcaatatctctaccgccagcgcctttgtcgcggcggcctgtggactgaaagtggcgaaacacggcaaccgtagcgtgtccagcaaatcggggtcatccgatctgctggcggcgttcggtattaatctggatatgaacgccgataaatcacgtcaggcgttagatgaactgggcgtctgtttcctgtttgcgccgaaatatcacaccggactccgtcacgcgatgccggttcgccaacagttaaaaacgcgaaccctgttcaacgtactcggcccgctgatcaacccggcgcatccgccgctggcgttgattggcgtctatagcccggaactggtgctgccgattgcggaaaccttacgggtactgggctatcagcgcgcggcggtggtacatagcggcggcatggatgaggtttcgctccatgcgccgacgattgtcgcggagctgcatgatggcgaaattaaaagctatcaacttacggcggaggattttggcctgacgccttaccatcaggatcagttggctggcggcacgccggaagaaaaccgtgacattctgacgcggttattacaaggtaaaggcgatgccgcgcatgaggccgccgtcgccgccaacgtggcgatgctgatgcgtctgcatggtcaggaagatctcaaggccaacgcgcaaaccgtgcttgatgttctgcgcaacggcaccgcatatgacagagtcaccgcactggcggcaagagggtaaataatgcaaaccgttttagcgaaaatcgtcgcagacaaggcgatttgggtagaagcccgcaaacagcaacagccgctggccagttttcaaaatgagatccagccaagtacacgccatttttatgatgcgctccagggcgcgcgtaccgcctttattctggagtgtaagaaagcatcgccatcaaaaggcgtgattcgcgacgatttcgatccggcgcgtattgccagtatttatcaacattacgcctcggcgatctcggtgctcaccgacgaaaaatattttcaggggagcttcgattttctgccggtcgttagccaaagcgcgccgcagccgattctgtgtaaggattttattatcgatccctatcagatctaccttgcccgttactatcaggccgatgcctgtttactgatgctctcggttctggatgacgaacagtatcgccaactctccgccgtcgcgcacagtctgaaaatgggcgtgctcacggaggtcagtaatgacgaagaacgggagcgcgcgatagcgttaggcgcaaaagtggtaggtatcaacaatcgcgatctgcgcgatctgtcgattgatttgaatcgcacccgccagctggcgccaaaactgggccacggcgtgactgtcatcagcgagtccgggattaacacctatggtcaggtacgcgaactgagccacttcgccaacggttttttaattggctccgcgttaatggcgcatgacgatcttaacgccgccgtccgtcgcgtgctgcttggcgaaaataaagtctgcggcctgacccgcgcccaggacgctaaagcggcctgtgacgctggcgcaatatatggcgggttgatttttgtgccctcatctccgcgcgcggttagcgttgagcaggcgcgagaagtgataagcggcgcgccattgcagtatgtcggcgttttcaagaacgctgatatcgccgatgtttgccagaaagccgccgtcctgtcgctttctgccgtacagctacatggcagcgaagaccaggcgtatgtcaacgcgctgcgcgaggcgttgccgaaacaggtgcaaatctggaaggcgctgagcgttagcgatgcccttcccgcacgcgattatcaccatgtcgataaatacattttcgacaatgggcaaggcggcagcgggcagcgcttcgactggtcactgctacaggggcaaccgctggataatgtgttactggcgggcgggctggcggccgataactgcgtccaggcggcgcaagtcggctgtgccggtctcgattttaattcaggtgtggagtcacagccgggcatcaaagatgctcgtcttctggcctcagtttttcagacactgcgcgcatattaaggaaaaaacatgacaacacttctcaacccctactttggtgaattcggcggcatgtatgtgccgcagatcctgatgcctgcgctgaaccagcttgaagaggccttcgtcagcgcgcaaaaagatcctgaatttcaggcgcaattcgccgatctgctaaaaaactacgcgggacgccccaccgcgctgacgaaatgccagaacattaccgccggtacgcgtaccacgttgtatttaaagcgcgaagatttactgcacggcggcgcgcacaaaaccaatcaggtactgggtcaggcgctgctggccaaacggatgggtaaaagcgagattatcgctgaaaccggcgccggtcagcacggcgtcgcctctgcgctcgccagcgccctgctgggtctgaaatgccgtatctatatgggcgccaaagacgttgagcgccagtcgccgaacgtcttccgtatgcgtctgatgggcgctgaggtcatcccggttcatagcggctccgctacgctaaaagatgcctgtaacgaggcgctgcgcgactggtccggtagttacgaaaccgcgcactatatgctcggcacggcggcaggaccgcatccctatcccaccatcgttcgcgagttccagcgcatgattggcgaagagacgaaagcgcaaatcctcgacaaagagggccgtctgccagatgccgttatcgcttgcgtcggtggcggctcaaacgctatcgggatgtttgccgattttattaatgataccagcgtcgggctaataggcgttgaacctggtggtcatggtattgaaaccggcgagcatggcgcgccgcttaaacatggtcgcgttggcatctatttcgggatgaaagcgccgatgatgcaaacagcagacgggcaaattgaagagtcctattccatttccgccgggctcgatttcccgtccgttgggccgcaacatgcgtacctgaacagcatcggacgcgcggattatgtctccattaccgatgatgaggcgctggaagccttcaaaacgttgtgccgccatgagggaattatcccggcgctggagtcctcccacgcgttggcgcacgctctgaaaatgatgcgcgagcagccggaaaaagagcaactgctggtggtcaatctctctggccgcggagataaagacatctttaccgtacacgatatcctgaaagcgcgaggggaaatctgatggaacgctacgaaaatttatttgcccaactcaacgatcgccgggaaggcgcttttgtccccttcgtgaccctgggcgaccctggcattgaacagtcactgaaaattattgacacactgattgacgctggcgccgacgctctggaactgggggttcccttctccgatccgctggccgatggccctaccatccagaatgcgaacttacgcgccttcgccgctggcgtcacgccggctcagtgttttgaaatgctggcgctgattcgtgaaaaacacccgaccattccgattggcctgctaatgtacgcgaatctggtgttcaataacggcatagatgcgttctatgcccgttgtgaacaggttggcgtagattccgtgctggtcgcagatgtcccggttgaagaatcggcccccttccgccaggcagcgttacggcataatatcgcgccgatcttcatctgcccgccaaatgcggatgacgatcttctgcgccaggtcgcatcttacggccgcggttacacctacctgctttcgcgttcgggtgtcaccggcgcggaaaaccgtggcgcattgccgttgcatcatctcattgagaagcttaaagagtaccatgccgcgcctgcgttacagggcttcggtatctcctcgccggaacaggtgtctgcggccgtgcgtgccggggcggctggcgctatctccggctcagccattgtcaagattatcgagaaaaacctcgcgtctcccaaacagatgttggcggagctcaggtcctttgtctcagccatgaaagccgccagccgcgcataacgggttaagccgtcagcataacgctggcggcttaatgagtggctggcgccgaaccagaatcacgattcagacgtacatcatcaatctttttggtgttattccccgtccagctttcaaaaagtctgaagtcaatttttgctaagaaaactcctaatcacgccgaaaaatttagcgttttcacgtcaatttcccccgcctttatgtaaagaaatgtcaacaaacaatgcattaacgtttccagggccgcagatagtgacgattgttattaataacaatgcaaagcatttcctgttaaatcgcttattctaaaagaaaatatagaatatattatctctaaaccattttttgtgcgttatttacgcggtaaatcacaactatttccgtcaatttgactaatcggtttaaccaactaattttaatagggtgtcgacacggttaaaaccgattttttcagcaagcaacgagacaggagaaataatatggccgaacatcgtggtggttcaggaaatttcgccgagaatcgtgaaaaagcatctgaagcgggccgcaaaggcggtcagcatagcggcgggaatttcaaaaacgatccgcaacgagcttctgaagccggtaaaaaaggtggtcagaatagtcacggcggacgtaaatccgataattcctgatttactgtaatgtaaatataacacatgcttttatcaagcaatctgcgagtcttctggctcgcagtattttgcccaggagaattagatttatgaatatcaaaaccgttgaagacctttttatccatctactttcagatacctatagtgcagaaaaacaattaaccaaggctcttcctaaacttgccagagccacgtccaatgaaaaattaagccaggcctttcaatctcatcttgaagaaacccagggtcagattgaacgtattgatcagatcgtcgaatctgaatctggcattaaactgaaaagaatgaaatgcgtcgctatggaagggctgattgaagaagccaatgaagtcatcgaaagtacggagaaaaacgaagtacgcgatgcagcgcttatcgccgcggcgcaaaaagtcgagcattacgaaatcgccagctacggcacgctagccaccctggccgagcagctcggctatagcaaagcattaaaactgctcaaagaaaccctcgacgaggaaaaacaaactgatttaaaacttaccgatttagcagtcagcaatgttaataaaagtgctgaacgcaaatcgaaataatatttttaattatcagcttgcatgattccgattttattatcggagcagattatcacgcattgaggaatgtaaaatgaattatactgaacattatcatgactggcttcgtgacgcccatgccatggaaaaacaggcagaatcgatgcttgaatctatggccagccgtattgaaaattatcctgatataaaagccagaattgaacaacatattagtgaaaccaaacatcaaattaccatgctcgaagaagtgttggaccgtaatggcatttcccgttcggtgttgaaagactccatgagtaaaatggcagcaatggggcaatctatcggtggcatgttcccttccgatgaaattgtcaaaggttcaattagcggttatgttttcgagcagttcgaaattgcttgttatacctccctgctggcggcggcaaaaaaagctggcgacactgcctcaattccgacgattgaagccattctgaaagaagaaatgcaaatggctgactggcttatcaaacatattccgcagacaacggaacaatttttactgcgatctgaagcagatggcgttgaagccaaaaaataaataataagcaggaggcaatatgtttcgacacgtaaaacaacttcaatatactgtgcgagtgagcgaacctaatcctggattagcgaacctgctgctggaacagtttggcggcccgcagggcgaactggcggccgcctgccgctacttcacgcaaggtttaagcgatgatgatgccggtcgtagagaaatgttaatggacatcgccaccgaggagctgagtcatctggaaattatcggctcactggtaggaatgcttaataaaggcgctaaaggcgagctggcggaaggtaccgaaaacgaagcggaactttatcgctcgctgacgcagaatggtaatgatagccatatcacctctctgctgtatggcggcggcccggcgttgacaaactccggcggcgtaccgtggaccgcggcttatattgatactatcggcgaagtcacagccgatctacgctcaaacatcgcggcagaggcgcgagcgaagatcatttatgaacgcctgattaatctgaccgacgatcctggcgtaaaagacacactcagtttcttaatgacccgtgaagtcgcgcaccagctctcttttgaaaaggcgctgtattcgattcgtaacaacttcccgccgggtaaattaccgccggtagaacagtataccgacgtgtactacaacatgtcgcaaggcgacgatccgcgaggtagctggaatagcgatgagaacttcaactatgtcgcagaaccgatgcctgctgttgatggcggcgatggcctggcgacagtgaaattgccgcgcgagcagatggcgctgctcaaagcgatggcagaaagaacgaaatcggaccccaccgttgatcctctcactggcgcagaactaggctgcggcgaaccgaaagaagacaagtgagttccgacaagtaaaatccgtgtgtcatgtccttttttgaccccgcctggcggggtcttttttcgtcacaacatcacgcgattagaaacgatagcctgccgagaacataaatacccatgggtccagacgcacgctgtcatgatgctgaacgccgcccattttataattggcggtagtatcaatatccatgtaccagacagaggcgccaattaaccagtcgcggttaatcaggtaatctaccccaacttgccctgccgcgccccaggaatccttaaagctcagatcggacagcccggcatttttaccattatcgttaaagtcgttatcgaagaaggtggtgtagttcacccccacgccgacataaggacgcactttgctgctggaatcgccgaagtaccactgcgccattaacgttggcggtaacaggtggaccgtggcgatatcgcccgtcgcgcccgtacccaccttatggcggaacggcgtagccgccagcaattcaaccccgatattgtccgtcgccatgtaagtgaatgtcaggccgagttgcgtgttattactcacatcaaacccgtttaaatgccccagcgtaccacccgccccttctgtaggtctgacggttgccggacctgcacgcataaagaattctccggcttcgtgcgcgaacgcgctgcctgagagaagagttgttaacgccagtgccgccactgtaaattttttcatacccgctccatcgttatggttataaaagcgtgatgaatatacccacaatgaagtaataagtgatctaatacagatcacatttgttcttataatttaacatttattgatccagattaatttagaacttgtattgaaaatcctggttataggaattcagatcaattttgacatattcacgctatgcaaatatttgtctgctcctgttgccctggcgataaaggctggctaaggtaatcaatgtcccgcaatggcgcgtggcgttaagattcgcgaacactgcgggacagattaatttccgttgtaatctattgatacgttagttttttgcaggtgaatcatgagcgttcttaacccatgcatgacatgcggtgcctgttgtgcctattttcgtgtctccttttattgggctgaaggcgacgatgccagcggacgcgttccggcgtcattaaccgagcctgttaccccttttttacgttgtatggccggtaccaaccaaaaacagccgcactgtaaagcgctaattggcacgccgggtgaaaacgtcagttgcgctatttatgaaaaccgcccttcaacctgtcgcgaattttcgatatcgggcgaaggaggcgaagtgaatgaggcgtgtaatcgcgcccgcgcgcgatacggattaccgccgctttacaaagatatgcttttccatacaactgctgatgctgccactgtagagttatccagggtacaattgcccgcaaattaacacctgcaaaactcaaggagagtgcatgtctatcacggcgaagtccgtttaccgtgacgccggaaattttttccgaaatcaatttattactatcttgctggtttcgttgctgtgcgcatttatcacggtggtcttaggtcatgccttttcacccagcgatgcgcaaatcgcgcaactcagtgaaggagaacatctggcaggcagcgctggcctgtttgagctggtacaaaatatgacgccggagcagcaacagatcctgttgcgcgcctctgccgcctcgacgttttccgggcttatcggcaacgctattctggccggcggtatcatcctgatgattcagttagtttcagcgggacatcgggttagcgcgctgcgcgctatcggcgccagcgcccctgcattgcctaaactgtttattcttatttttctgactaccctgttagtgcaaatcggtataatgctgattgtcgttccggggattattatggccattgtgctggcgcttgcgccagtgatgttggttgaagagaaaatgggcgtgtttgccgcaatgcgcagcagtatgcgtttagcctgggctaacatgagactggtcgcgcccgcggtgataggctggttactggctaaaacattgctattgctgttcgcgcccagcttcgctgtactgaccccaaatgtaggcgctgtactggcgaatacgttgagcaatctgatttccgcagtattgcttatctacttattccgcctgtatatgttgattcgccaataatccgcaatgcgccgttacgcggcgcattcgacgctcgttgatgatggaatcgaagaatgaagcagtttctggattttttaccgctggttgtcttttttgcgttttataaactttatgacatctatgcggcgacctccgcactgattgtcgcgacggcaatcgtgctgatttatagctgggtgcgctatcggaaaatagagaagatggcgctgattacctttgttctggttgccgtcttcggcggtctgacgctcttcttccataacgatgaatttattaaatggaaggtgacggttatttatgcgctgttcgccggcgcgctgttaataagccagtgggtgatgaaaaaaccgttaattcaacgtatgttaggtaaagaactggcgttgccgcagcaggtctggtcaaagctgaacctggcgtgggcgctgttttttattgcgtgcggtctggctaacatttatatcgccttctggttgccgcaaaatatctgggtcaactttaaggtctttggactcacggcgctgacgctcatttttaccctgctgagcggcgtctatatctaccggcatctgccacaggaagataaatcataaccctcccgtgacttatcatcgccagactgcgaacgcctggcgatattttctccgcctttacgccctgcgctttcccgtcagtacctttattcccactattctccacacaaaattcatagtagcatcgcggctgtaattttttctgatagtcggttttacaatgacaacaatggataatactcctcagggcgagctggttttacgtacattggccatgcctgccgataccaatgcgaacggcgatatttttggcggctggctgatgtcgcaaatggatattggcggcgcgatactggccaaagagatcgcgcacggtcgggttgtaaccgtacgcgtggaaggaatgacatttctgcgccccgtcgcggttggcgatgtcgtatgctgctacgcgcgctgcgttaaacgcggtacgacgtctattagcataaatattgaagtctgggtgaaaaaagtcgcgtcagaaccgattgggcagcgctacaaggccaccgaggcgctgtttatttatgttgccgtcgatccggacggtaaacctcgcccgctcccggttcagggttaagtatacccgcttacgccgccagcaggtgatggtatattcctggctggcggcgccagagattactcaatctgcgccgtaccgttcagacggaagataatattgaccaccagcccggaacccggcttgcctgcttcatagcgccattttcgcatcgcattcttaacttcacgctcaaacatattggctggctgcgcggatagaatctgtacattttccactcgcccagcagaggtcacgtcaaacttcacctttacgcggccttcaatacgtaacgcctgtgctcgcgccggatactgcggctggttacggctcagagcgcgaggtccagtgggcacgctcaccgcgggcttgctggtcgccgatgcggtgctgcttgttggccgcaccggggcgctattttcaaacggtgaggcaggacgcggcgcggctggtttgacttcgcgcttcggctgctcttcaacctttttcaccggtttcggttttggcttgggttttggcttaggtttgggtttctcaatcaccacgggcgcttctttaggcggttcagggatcggctctggctccggttcgggttcgggttcaaccaccggctccggcggcggctgaaccgcctggggcggctccaggtcagcgggtgaaaccattgtcaccgtgataggctgcgctggcgcaggcaattcaataacctgatgtaccgaggtatagagcaaacctgccactacagcaccatgaatgcctacggaaaggagtgtcggccagggaaagcgacgaggtaaatcaagggtcattgaagtcataatcgtttcagttgaaaaaccagagctgaattttaaatgcaaatagcaatcatattcaataaggcattgccgatagcggcatttaaaagatgatatcgcacaaaaacaccacacaaaatgtgcatgtttaacaaagtcggtatctttacattgcagttaaatgccctttccaataacgtaatcagcaacttttaccgattaaggagctctacccgtgctgtatgttatttacgctcaggacaatgccaactcgcttgaaaaacgcctctcggtacggcccgcgcatctggcgcgcctgcaacttctgcatgatgaagggcgattattaactgccgggccgatgcccgcagtggacagtaacgatcctggggtagccggatttaccgggtcaacggtgattgctgaatttgaatctttagaagcagcgcaatcctgggctgatgcggacccctacgtcgccgcgggcgtctatgcgcaggtttcggtcaaaccgtataagaagatcttttgaaaaggatggcctgttgggcaccgcatacggtgccctttctggctcacacaccgtgaatcgcaaagagtaatgaattacgctgacgattaaagatgcatttcctgatggtatggatacgcatattacggcgtgattgcccttcaagccaacgcgctttacggcggctcgcctgacgtagcattcgccagcgccccacttccgttctactacgcttcatgtttacgactctcactgtaacagaagcgccattataccccctcgccggatgcagaccagcgcttttcccgtgtttttatttgccatgtgaatcctgacgcgtaaactcttaacaacacgctttttaaaggatttttaaagttatgacaaccttctacaccgtggtgagttggctggtcattttgggatactgggttctcattgccggcgtcacattacgtattctaatgaaacggcgcgcagttccctccgcaatggcctggttgttaatcatctatatccttccgctggtcgggatcatcgcctatttgtccgtgggcgaattgcatttaggcaaacgtcgcgccgagcgtgcccgcgccatgtggccgtctaccgccaaatggttgaatgacctcaaagcctgcaaacacattttcgcgcaagaaaacagtagcgtcgcatcgtccttgtttaagctgtgcgaacgacgtcaggggattgcgggcgtcaaaggcaaccagttgcaattgcttaccgactccgatgatgtcatgcaggcgcttattcgcgatatccaactggcgcggcataatatcgaaatggtgttttacatctggcagccaggcggcatggcggatcaggtcgctgaatcgctaatggccgccgcccgccgcggcatccattgccggcttatgctggactccgcgggtagcgtcgctttcttccgcagcccctgggcggccatgatgcgtaacgctggcattgaagtcgtagaggcgctgaaggtgaatctgatgcgcgtctttttacgccgtatggatcttcgccagcaccgtaaaatggtgatgattgacaattacatcgcctataccggcagtatgaatatggtggacccgcgttttttcaaacaggatgccggcgttggacaatgggtcgatttgatggcgcggatggaggggcccgtggcgacagcaatggggattgtttactcctgcgattgggaaatcgagacgggtaaacgcattctgcctcccccgccggatgtgaatattatgccgtttgagcaggccagcgggcataccattcataccattgcttccggtcctggatttccggaagatctcattcaccaggcactattaaccgccacctatgctgcgcgcgaatatttaattatgaccacgccatatttcgtccccagcgacgatctgctgcacgctatttgtaccgctgcgcagcgcggcgtggatgtcagtattatcctgccccgtaaaaatgattcactgctcgtcggctgggccagtcgcgccttttttagcgagttactggcggcgggcgtgaaaatctatcagttcgaaggcgggctgttacataccaaaagcgtgctggtcgatggcgaactgagcctggtcggtaccgtgaatctcgacatgcgtagcctgtggcttaatttcgagattacgctggtcattgatgatacgggtttcggcgccgatctggctgcggtacaggacgattatatttcgcgctcccgcctgttagatgcacgtttgtgggtaaaacgtccgttatggcagcgtattaccgagcgattgttttacttctttagtccattgctgtaaaacgtgaccaacatgagtaaacaggtagtcactatggaaatggatctgaacaatcgcctgactgaagacgaaacgcttgagcaggcttacgatatttttcttgagctggcggcggataatcttgatccggctgatatcattctgttcaatttgcaattcgaggagcgcggcggcgcggagttgtttgatcccgctgaagactggcaagagcacatcgattttgacctgaatccagacttttttgccgaggtggtaattggcctggcggataccgaagacggcgaaattaacgacatttttgcccgcgttctgctgtgccgggaaaaggaccacaagctgtgccatattctctggcgcgaataagcggttcaggccggatggcgtctgattgcgccctccggcaagcctgtttaatccggtagcttactgccgcatcggttacaatattgcgcgctatgttcatgctggctttgctggcactgcggacattttcgctgccagtgacgtttttgaaacgcgctgctcatgtgcgtggtaatcagtcctgtaggaatcgcaatcaccgaatagccaatcaaaataagcaccgacgcgacaatacgtcccagcggcgtatgcggcgtaatatcaccgtaccccacggttgtgactgtcactatcgcccaatacaccgaggcattaagcgtcgtgaagccatatttcggtccttcaataagatacatcagggcaccgaaaataatcatcacgatcgcaataaatgaatagaacagaataagctgatgacgcgcgctaataatggcgctccagaatacccgcagcgatggcataaagcgtagcagtttaagaatacgcagcacgcgaatcgctcgcatagcgcgccaggcaaacatatagttcaggctaatttccggccacagccacatgacgtacagcggcaaaatcgtcaccagatcaataaatccccagaaactaaaaacgtattttgccggttcgggccagctaaacagtctgagcaagtattcaccggtaaatatcagggtaacgcagagctccagccagacaaaaatatgccattcatcaaatgtcaggtgatattccgttcctacgcctgattcaacaaaaatgaccagtacgctaagcagcgcaaacagcgcgcataacccttcaaaacggcgacctgagcgcgtagtcaaatcgaacagattatgataaagacgacggcgaaccgacgacaaagaaagtgacacggtaacctcacctaaaagaagggctgacgaattgtcagcccttgcgattataacgggtctactttaaggcaggaaacggcatggcgaaaactcccttccagcaccggtcgcgtttgcgcgcattctggcccggctatcggacagcgtgtacggaacacgcagccggaaggcgggttaatgggcgaaggtaattcgccctccagcaattgtatcttcttatttcgctccagatcgggatcgggaatcggtaccgccgacatcagcgctttggtataaggatgcagtggattatggtacacctcatcataggtgcccaattctactgcatgaccgagatacatcaccaggacacgatcggatatgtgctttacgaccgccagatcgtgcgcaataaaaatcaacgacagccccatctctcgctgtaactgctggagcaaattcaccacctgcgcctgaatagaaacgtccagcgccgacaccggctcatcgcaaataatgagcttaggttccaggatcaatgcccgggcgataccgatgcgctggcactgccccccggaaaattcatggggataacggttgatgaggttcggcaacagccccactttcagcatcatggctttcacgcggtcacgcacgtcctggcgcgaaagtttaggatgataagtgcgcagcggttcagcgataatttcgccaatcgtcattcgcgggttgagtgacgccagcgggtcctggaaaatcatctggatatcgctgcgcacctcgcgccactcatccgctttcatgcccagcagatcttttcccagccaggcgactttaccatctgtcgccttcaccagaccaataatcgcgcgcgcaaacgtcgacttgccgcagccggattcgcccaccacgcccagcgtttcgccttcatacaggcgtagcgtaacgccgtccaccgctttcagggttttcggcggttgccagaaccactgcttcccttctttgatatcaaaatgtactttcagatcggcgatttcgaggagaactttacgttgttcaatcacagcattcatagcagttcctccaccggtttaaaacaggcgcgcaagcgaccaggactaaacgcttcaagtggcggcgcattattgcagatctccatcgcatgaggacaacgcggctggaacggacaacctttaggcaaacgcaataaattgggaggattgcccggaatcgtcagcatttccgccccctcgctatccagacgcggcaccgcattaagcaggcctatcgaatacggatgaacgggctgataaaagacatcgcgcgccttaccgtattccatggtacgcccggcatacattaccaggaccttatcgcaaatacccgcgaccacgcccagatcgtgggtaatcatgataatggcggtattaaattcgcgctttagctcattaagcaaggtcataatctgcgcctgcacggtaacatcaagcgcggtggtaggctcatcggcaataagcagtttcggcctgcacaacagcgccatcgcaatcatcacacgttgacgcattccgccggaaaattcgtgcgggtacattttcatccgtttgcgcgcttccggcatttttacggcatccagcattctgacggactcttcaaaagcttccgctttgctcatccctttatgcagcatcaggacttccattaactgctccccaacgcgcatataaggatttagcgaggtcatcgggtcctgaaaaatcatcgaaatctgttctgcgcgcagcgtattcagttcgcgctcaggtagattaagaatttcacgtccgttgaaggtcgcggaaccgccgattcgaccattcgtcgccagcagtcccattaatgcgaacgccgtttgcgatttccccgatccagactcgccaacaatacctaacgtttctccagcgcgaagcgtaaagttcagatcgttgaccgccgtcacatcgccatcaggcgtagcgaacgtaacacgaagatcgtttacctccagcagtacattcgccggttgcggcgcctgagttgcggtttctgataagctcatggctgtactccttaacgatctttcgggtcgagggcatcacgcaggccatcgccaataaagttaaaacagaataacgtcaccacgagaaagccagccggaaacagcagcagccacggtgagacttccattgaatttgcgccatcgctcaataacgctccccaactgcttaacggttcctgcgtcccaagccccaggaaactgaggaaagactcaaacagaatcatgctgggcaccagcaacgatgcatacactaccactacgcccaggacgttaggcacaatatggcggatcacaatgctggcagtcgacacaccacccacctgcgcggcttcgatgaattctttacgtttaagacttagggtttggccacgcacgatacgcgccatatcaagccaggagaccatgccgatggcgacgaaaatcaacagaatgttctgcccaaaaaacgtcaccagcaaaatcacaaagaacataaacgggaacgagttgaggatctccaacaaacgcatcatcacagaatcaattttgccgcccagatagccggacagcgagccatacagcgttccgacaatgaccgccaccagcgcggcggcaatcccgaccattaatgagatacgcccgccgatggcaacgcgcaccaacagatcgcgcccggaagagtcagtgccgaaatagtgaccggacgccatatccggcgcactggacatcatgccccagtcggtatcgaaataggtaaattgcgacagcataggcgccactgtcacgaacagggctatcagaaacaggacaataagactggccaccgccgcacggttatgcataaagcgccgacgggcatcttgccaaaggctgcgaccttccacctccagcttttcactgaaattttccagcgtctcgctgtttttcttacttaacatcatcgcgagctccagtatcaatagcgaattttcgggtcgataacggcatagagcacatcgacaatggcgttaaataatatggtcagcgccccgactagaatggtcaaacttaacaccagcgagtaatcgcggttgagcgcgccattaacgaaaagctgcccaatgcccggtaagccataaatagtttcaatcaccattgagccggtaataatgccgacaaaggctggccccatataggataaaaccggcagcagcgcaggttttaacgcatggcggaagataattctgcgcatcggtaatccttttgcccgcgcggtacgaataaagttcgaatgcagaacttcaatcattgagccgcgcgtaatacgagcgatgctggcaatataggccagtgaaagcgcaaccatcggcaggatcataaattttaacgccccgccgttccagccgccgccaggcagccattgcaaggttatcgcaaagaccatcaccagtagcggcgccaccacaaaactggggataacgacgccggtcatggcaaatcccatcaccgtataatcccatcgcgtattttgctttagcgcggcaatcacgccagcgctgacaccaataatgaccgccagcaaaaaagcggcggcgccaagtttcgccgaaacggggaagctggcggcaaccagatcgttgaccgtgtaatctttatatttaaacgatggtccaaaatcgccatgcgccagctgcttcaggtagctgaagtactgcgtcatgatgggatcgttcagatgatattttgcttcaatattggccagcacttccggcggcaatgcgcgctcgccggtaaaaggactccccggcgcgaggcgcatcataaagaaagagatggtaataagaataaacagcgtcggaatcgcttccagacagcggcgtaaaataaatttcaacattgcccgtaccttctggcctgtgcctttacttcccggacgtgacaaaagatccgccagggaaagttatagtgcgatgaaaaaagacaccatgggacaaccgcagttgtcccatgtcttgccattaatgtttgataatatataagtttttcacataaatattatccagcgggtctttaccggtatacccgcccacccagggtttcaccaggcgcgcgttaacgtagtaatacaccggcacaatagccgagtctttatctaactgctgctccgctttagcgtagagttcgctgcgctgcgtatcgtccgccactttcagcgtgtcggcaatcagcttatcaaacgccgggctcttataatgcgcggtgttatttgaactgtcggacaacatggtattcaggaacgaggtcggttcattataatctgcgcaccacccggctctggcaacatcaaaggtgccctgatgacgggtatccaggaaggttttccattcctgattctccagattcacattgacgcccagatttttcttccagatagacgccacggcaatggccagttttttatgcagatcggaggtgttatacagcaggtcgaatgttaagggcttatccgccgtaaagccggcttcagccaacaatttcttcgcttcttcattacgcttttgctgggaccatttgaaccactcaggctctaccagttttgcgccatcggtatacggcggcgtgtagctataagcgggtaaatcgccctgatttttaaccttattaacaataatgtcgcgatctaacgccagtttcagcgcggtacgcacgcggacatcgttaaacggcgctttttgattattaatttcgtaataataggtacacaaataagggtctacgcggacttcattcgggatctctttcttcagtttctggaataattcgatcggcatattgttataagtcatatcgatctcgccgctgcggtagcggttgacatccgtcacctccgaagagataggcaaataagttacctgattgatgacggttttggcgttatcccagtattgcgggttacgctccagcacgatacgttcgttcaccacccagttttttaacttataagcgccgttagtgacaatattggccggttgcgtccatttatcgccaaatttttcgaccgctgatttcggtacaggagacactgaagggtggaccaacaatttgtagaaataaggcaccggctcacttaaggtcacttcaaaggtgtgatcatcaagcgcttttacccccagatcggtggcgggttttttaccggcgataatgtcatcgatattagcgatatgaccgtattgcagatagctggcgtacggcgatgccgtattaggatcggccaggcgttgccagctataaacgaaatcatgggcggtgacgggcgtaccatctgaccatttcgcattttcacgtagatggaatgtccagactttaaaatctttattttcccatttttccgcgacgcccggtgaaggatgcccctcgacatcactaattaataagccttcgaagaggtcacggctgacgttcgattccggcacgccttcaattttatgcgggtcgagagactgcacttctgatccgttattacgtaccaacgtttgcttgtcggctaactgaacgccggcgggcacgtctgccgcagtcgcggcgctggcggcgatgagcgcagtgagtattcccgctgcaatcaaactttttttcgtgatgttagacattgtgtttgtactccactcattataattactggtttttaccagcctgtttaatcccgtcagggttcctgtgcagcactggtggtgtactgccaggtctgtcactgcttttgctatcaccgactttatttattctgacgattcgttcgatcgcctttcgtcgattcagtatacgacgtacctgcccacgtcgcacgttatttctgacaaccatctaaatgaaaatacttatcaacaatgtgaaatcttctacaaaaatgtttggccgaaaagtatcaaatgcgtttctgaaccgccaattcattttacaattttgttaaccaattctcttttatggaaaaatccctgcccaaaaaaacagttaaacaatgttaaaaatctttgatttattctttataatcaataagttgaaagaaaaatatctctctgtcgcatcgtaggttatgcctgcgccagaaaacacacacaaatttaacaaatgctcattatttagcacattcatctacgatggagctgaaacaactaataacatttcaataatccttcatcaagccccagagtatggtgtgaataaaataacagacctaccgcctctcacggtctcagtaatgttgataatagtttgattaataaaaataaatagcgttagattatattagtattttttatcatttaaacgctgaatgcttatcaaagtaagaagtgttacgtgggaatgtcacaaggcggccccttagggcgccgcctgtaaatcagcaggtgggagtttagttgagcaagccggggaaaatgccttttattcctgtgacaataaattcgatgccgagcgccattaacaacaaccccatgattcgggtaataacgttgataccagtttgccccagcaaacgaaccagccacggcgccatacggaacacgccccagcagcaaagcgcaaaaagcgcaatggcaactgaaaagccaagcaaatgcgcgatgctgtgataacgcgtcccccagacgatagtggagctgatcgcccctggccccgccattaacggcagcgctaacggcacaacgccaatgctctcgcgtatggccgtctctgacttttcttgcttgttttgtttatcttcccccagcttcccgctgatcatcgacattgcaatggtgacaaccaggataccgcccgcaattctgaacgaatcaatagaaataccaaagagttgcaggatgccatcgccgaggaataaggaactccacaagataatcgcaaccgacagattcgcggtgaggttagttttattacgcgccgtggccgtctggtagctggtcatgctgatgaaaacggggataatccccaccgggttaaccagcgcaaagagcccgataaagaacttaaagtaaacaggaaaatcaaaaagcggttgaatcacggttagctccgaagcgttagccggatgaagtcaatgttcgttaatgatcaaaacgcgcagaagatacgccttttattcgcatagttcacctcttatctacgcctaatttcatccattcatcgctgttatttatatgtactcgttatgctaatccactcactcttcatgataacgatttcttaacaatttacataaaaggctaaaatggcctgctgaaaggtgtcagctttgcgtaatcttgatttagatcacacaatcgctactcagaagtgagtaatcttgcttacgccacctggacgtaacgcgttagagttaaatgatactaacgcagaagctcttttagtaaatcagagcgaaacggacgttaagtaaccacctgaatttcaggcatttatacaaagtatcgtcgatctgtctatactcacgtatcgcgcagatgatttactaaaaaagtttaacattatcaggagagcattatggctgttactaatgtcgctgaacttaacgcactcgtagagcgtgtaaaaaaagcccagcgtgaatatgccagtttcactcaagaacaggtcgacaaaatcttccgcgccgccgctctggctgccgctgatgcccgcattccgctggccaaaatggccgtcgccgaatccggtatgggtatcgtggaagacaaagtgattaaaaaccacttcgcttctgaatatatttacaacgcctataaagatgaaaaaacctgcggcgtgctgtctgaagacgacaccttcgggaccatcaccattgctgaacctatcggcattatttgcggtatcgttccaaccactaacccaacctctaccgcgatcttcaaatcgctgattagcctgaagacccgtaacgccatcatcttttctccgcatccgcgcgctaaagaagcaaccaacaaagcggcagacatcgttctgcaagcggctatcgctgccggcgcgccgaaagatctgattggctggatcgatcaaccttccgtagaactgtctaacgcgttgatgcaccacccggatattaacctgatcctcgccactggcggtccaggcatggttaaagctgcatacagctccggtaaaccggctatcggcgtaggcgcaggcaacactccggttgtcattgatgaaaccgctgatatcaaacgcgctgtggcgtctgttctgatgtctaaaaccttcgataacggcgtaatctgtgcttctgaacagtctgttgtcgttgttgattccgtctatgatgccgttcgcgaacgtttcgccagccatggcggctacatgctgcagggccaggagctgaaagcggttcaaaacgttatcctgaaaaatggcgctctgaacgccgctatcgtcggccagccagcctacaaaatcgctgaactggcaggcttctccgtaccagaaaccaccaagattctgatcggtgaagttacggtcgttgacgaaagcgaaccgttcgcacacgaaaaactgtctccgactctggcgatgtatcgtgcgaaagatttcgaagaagcggtagaaaaagcagaaaaactggtcgctatgggcggtatcggtcacacctcctgcctgtacactgaccaggataaccagccagaacgcgttgcttacttcggtcagatgatgaaaaccgcgcgtatcctgatcaacaccccggcctctcagggtggtatcggtgacctgtacaacttcaaactcgcaccttccctgacgttgggttgtggttcctggggtggtaactccatctctgaaaacgttggtccgaaacacctgatcaacaagaaaaccgttgctaagcgagctgaaaacatgttgtggcacaaacttccgaaatctatctacttccgccgtggctctctgcccatcgcgctggatgaagtgattactgatggccacaaacgtgcgctcatcgtgactgaccgcttcctgttcaacaacggctatgcagaccagatcacctctgtgctgaaagcggctggcgttgaaaccgaagtcttcttcgaagttgaagcagacccgacgctttccgttgttcgcaaaggcgctgagctggctaactccttcaaaccggacgtgatcatcgcgctgggcggcggttccccgatggacgccgcgaaaatcatgtgggtcatgtacgaacatccggaaactcacttcgaagaactggcgctgcgctttatggacatccgtaaacgtatctacaagttcccgaaaatgggcgtgaaagcgaaaatgatcgccgtcaccaccacttccggtaccggttctgaagtcacaccgtttgcggttgtgaccgacgatgcaaccggtcagaaatatccgctggctgactacgccctgaccccggatatggcgattgtcgacgccaacctggtgatggatatgccgaagtccctgtgtgcgttcggtggtctggatgcggtaactcacgctctggaagcttatgtttccgtactggcttctgagttctctgacggtcaggctctgcaggctctgaaactgctgaaagaaaacctgccggcgtcttaccacgaaggttccaagaacccggttgcgcgtgaacgtgttcacagcgccgcgactatcgccggtatcgcgtttgccaacgccttcctcggtgtatgtcactccatggcgcacaaactgggctctcagttccacattccgcacggtctggcgaacgccctgctgatttgtaacgttatccgctacaacgcgaatgacaacccgaccaagcagaccgctttcagccagtacgatcgtccgcaggcacgccgtcgttacgctgaaattgctgaccacctgggcctgagcgcgccgggcgaccgtaccgctgctaagattgaaaaactgctggcatggctggaaagcattaaagctgagctgggtattcctaagtctatccgtgaagcaggcgtacaggaagctgacttcctggcacacgttgacaaactgtctgaagatgccttcgatgaccagtgcaccggcgctaacccgcgttatccactgatctccgaactgaaacagattctgctggatacctactacggtcgtgatttcaccgaaggtgaagttgcagcgaagaaagacgtcgttgccgcaccgaaagcagagaaaaaagcgaaaaaatccgcttaattcgttatctgttttagcatgacaataacggcctcaattgaggccgtttttttgttttacctgtttatctgatgcctgaaggcgctatgctgatcatctggcctacgtgctcacggcacgcccttcgtcaggaggcctgaataatgacctccaaagcgctacagggcgttttataagccgctctttacctcaggtatcatatgtgccgatgacgctcctgaatcgccgtcagtgagccctcctccagcgcgtccttataatgcttacggcaaactgaaacgtagcgttcattcccgccaataaccacctgttcgccttcgttataaggcctgccgtcctgatcaaggcgcagaaccatactggctttacgaccgcagaaacagatagtttttaattccaccagcttatctgaccatgccagcaagtattggctgccgacaaagagctccccacgaaagtctgttcgtagcccatagcaaagtactggaatatctaatttgtcgacaacctcggataattgataaacctgctggcgagtcaaaaactggctttcgtcgactaacacgcaatgtattgtctgccgcgcgctctcggcacgaatctcttcaaacaaggatgtattttggttaaacaattttgccggcgacgacaaaccgatacgagagctgactttgcctgcgccgaaacgatcgtcgatttccgccgtatatacgacggtacgcatcccgcgttcctgataattgtatgaagattgcagcagtgcagtcgacttacccgcattcattgccgaatagtagaaatatagctgtgccattggtcgcaggacctcacctgagtgaaataaagattggcgggattgtaccataatttaccgacgcgacggcgcggctcgcgctccggtgagtattaagaattgtacaaacatcgctcactatacccaaaataattcgcgttgcttaaaggcggcaagggagtgagtccccaggagcatagataactatgtgactggggtgagcgagcgtagccaacacataagcaacttgaagtatgaagggtatatacacattccttcacaaattatgccgttaaaattcatcaacaatgcttatcatcacccgccaatatgaaaaccttgtacttattgttaccgttactcatacccggtgcaaagtaatagggttttcttgtaaggaaagctaatacaagagattgatatctctgcaatgagatcgtatttcatcatgataaaatgtgacctgactcctaaatttttagcgacagacggtgagtatcccccctgccaataagctcttttttgtgcggtgcctcaaggaaaatttaagttgagataattaaaacgtgtgcttaataaagcgtaattttgaattccttacattcctggctattgcacaactgaatttatcgctctattattagctcaacaaaccaccccaatataagtttgagattactacaatgagcgaagcacttaaaattctgaacaacatccgtactcttcgtgcgcaggcaagagaatgtactctggaaacgcttgaagaaatgctggaaaaattagaagttgtcgttaatgagcgtcgtgaagaagaaagcgctgctgctgctgaagtggaagaacgcactcgtaaactgcaacagtatcgtgaaatgttaattgccgacggcattgacccgaatgaactgctgaatagcatggctgccgctaaatccggtaccaaagctaaacgcgcagctcgtccggctaaatatagctatgttgacgaaaacggtgaaactaaaacctggactggccagggtcgtacaccggctgtaatcaaaaaagcaatggaagaacaaggtaagcaactggaagatttcctgatcaaggaataatttacttcctggatgcttaaaatcccgccgctggcgggattttttttgcctgagttctccgctgacgaccccaggcataaaaaaagcgccggatttaccagcgcttctgttaaaaaatttataacgtatcgttacttcttaatacccatttcttcttcaagccaggctttaaattcagcacccagcgaattatgacggatgccatattcaacgaatgcctgcatatatcctaacttattaccacagtcatggcttttacccttcatgtggtaggcttcaaccgtttctttttcgatcagcatatcgatagcatcggtcaactgaatttcatccccggcgcccggaggggttttcgccagcaacgcccagatatccgcgctcaacacataacgcccgacaatcgcaaggttagacggcgcgacatccgcttttggtttttcaaccacgccaaccatcggcacactttcgcccggcgccagctcaacgcctttacaatcgaccacgccgtatgcagtcacatcttctaccggctcaaccataatctggctattgccggtttcgtcaaaacggcggatcatttcagccaggttatcctgagacaggtcggactcatattcgtcaagaataacgtctggcagaataacagcgacaggttcgtttccgacaacgggatgcgcgcacaatacggcatggcccaggccttttgccagcccttgacgtacctgcataatagtgacatgcggagggcaaatagactgaacctcctccagaagctgacgcttaacgcgtttttccagcatcgcttccagctcaaaactggtatcaaagtggttttcaatagagtttttagacgagtgcgtaacaagcacgatttcagtaatgccagcagcgatacattcgttcacgacgtactgaattaatggcttatcaaccagcggcagcatctctttcgggatagctttggtcgctggcagcatcctggttcccaatcccgcgaccgggataacggcttttttgactttcgaattaagggcagccatttaaaattctcctggactgttcatgtattgaacgtgttcattaatctgtatcgtgttccagtatatcagtaccagaacaagcctcaggtccaaaaaggacttatattggtataattaagacaaatacttataaatctgccgcagatagtaacactcgtcgggaaaggccggtaaagcaatttccgctcactcttccgtttggtcattccgcagacaacatcaatcgcagacgccctcctgcgccccatatttgacactgccacgagtcgcaacgctggcttaattggttaaggtaggcgttacccaatgttcctagcggcacgccgctgctaatttgaacctgatgagcgcccgtatttaaggtggcgttcaatccggcggagacgagaatcaaatttttgagctcactgtgatagtagccgacaaatagcgggaattgcccaggtaaattggcttgtctgagcagatgatttacctgttttaatagcgcgcctaactccggtaaacggtgcttttgttggcctagctgatcctgcaataagccgttaaatagcgcccgcagcaacaatgcggctaacacgccgttatcgcccgcccgggtgacatccaggcaataaaatgccagttcgttagtcagatagcggcgcaatatccagcaccagtccaggctgatcggcggagacgagctgccggtaattaatgcggcaatgagaaatcacctgctgtaccgggggctgcaattcctgcaacaattgcgctgcggcggtcggattactcaccattgcatcccagtcacgaaacaggcgttcttcttcttcaacccgcgagttaaacatattagggtataagcaagcgaatacggtttcccgcaagcggttgagatcttttaccggcttcagcaagacatcttcaaccccaaggcgcaacgctttggcgatatccgccatattttctgttgcggaaataaccagaataggcgtctggtctccgcgattacgtaagttttctaccagtttgagaccgttcattctcggcatagcgatatcacatatcatgagatcaggggtaaaacgccccatcaactccagggcatccaccccgtcgcctgccaatgccgttgtcgctcccaaagaggaaaaccacgaatccagaagcgagcgaaatacaggctcgtcttcaacaataagaatctgttttccgaccaatggctgcgtcatgttctctcccctgactggctttaatcaatagtggcatggtattgccgcttgcgcctgtcagaatttgcttaagtgatcgtaaaaggtacattaaacgtcggtacgcaccaagggtataagttcgtccatctttttctctacggctaactgacccgccgcaatagcggcatgggcgcgatgaaaatccagcgtagagatttgcggacagaatggttgaatgagaatatcaggcggatcgccagccatacggttacgtttaagacgattttccaacacctggatggaggttgtcatgatttccattgccccaggcgaactcacgccacggcgtgaagtcaggctactgaaacgttcttttaaacgcttatgccagggcagcgcatcatcgctctcttcattgatattcccgacatttacagagagcaaatcttgctgcatgaggtgggcatcatgttgcaggtctaccgcaataacgatatcagcccccagcgccctggttaacgaaacaggtaccggattaacgactgcgccatctaccagccagtaaccgttatgttcaaccggagacatcagccctggcatactgcacgacgcgcgtacagcaaggtgtagatcgccttcagtaaaccatagctctcgtcccgtgctaagattcgtcgcgaccgcgccaaaacgtcttgaacagtggtcaaaatccgtgacgggcataatatcccgatagtgattaaatacgcgttcgccgcgaagcaaccctcctctgccccaggatacatccatcaggcgtaaaacatcccagtagcggaatgaacatacccactgttcaagcgccgataatttattacaggcatacgcggcgccgaccagtgaacctattgagcatcctgcaacgatatcaatatcaatgcctgcttgcttgagggctttgatgaccccaatatgagaccatcctctcgctgcgccagatcccagcgccagccctattttcatttttctcatcgtacttaacgacttcccctggcttcaagacgtagcaacatcgccactgctcagttaacataatgccaccctggcgttcaacgccgttttttatattcagggagattattgtgtctcagccttgtccctgtggtagcgctgacgagtatagcctatgttgtggtcgtattgtgtccggagaacgagtagcacccgatccgtcacatctcatgcgctctcgttactgcgcttttgtgatgaaagacgcagattacttaattaagagctggcatccaacctgcaatgcggccgcgtttcgtgatgatatcatcgccggatttgccaataccaggtggctcggcctgactatttttgaacatacctggtcagaagcagaaaatacagggtatgttagttttatcgcgcgtttttccgaacaagggaaaaacggggcgattatcgaacgttctcgttttatcaaagaaaacggtcagtggtattatattgacggtacccgcccgcagttgggtcgaaatgatccctgcccgtgcggttcaggcaaaaaatttaaaaagtgctgcggccagtgacgcctgacagtatcgatacagcaaacactctcaacaggatttttccggcaatgcaatcactacaacgtaaagttctgcgtactatttgtcccgatcaaaaaggccttatcgcgcggattaccaacatttgctataagcatgagcttaatattgtgcaaaacaatgaatttgttgaccatcgcaccggacgcttttttatgcggaccgagctggaaggcatcttcaatgattccactcttctggccgatctggacagcgccttaccggaaggctctgttcgtgaactcaatcccgccggacgccgtcgggtagtgattctggttaccaaagaggcgcattgtctgggcgacctgctgatgaaagccaactatggcgggctggatgttgaaatcgccgcggtcattggcaaccatgaaacgttacgctcgctggttgaacgttttgagatccctttcgaactggtcagccatgagggattaacgcgtgaagagcatgacacgaagatggcggacgccattgatgcccatcaaccggactatgtggtgctggccaagtatatgcgtgttttgacgccaggttttgtggcgcgcttcccgaacaaaattatcaatatccaccactcattcctgccggcgtttatcggcgcgcgtccttatcatcaggcctatgagcgcggcgtgaaaatcatcggcgctaccgcgcactatgtgaatgataatctggatgaaggcccaatcattatgcaggacgtgattcatgtcgatcacacttacaccgcagaagatatgatgcgtgccgggcgcgacgttgagaaaaacgtattaagccgcgcgctgtatcaggttctggcacagcgagtctttgtttacggcaatcggacgattattctttaatcgtcagtaatatgaattgattagctttaatccgttacggatgaaaagtacgcaaacagttcatttcaggcaaaggaatgctttacagcggcgtgtcatttgatatgatgcgccccgcttcccaaaaggaagcgggccagtattaagcattaccccgtggtggggttcccgagcggccaaagggagcagactgtaaatctgccgtcatcgacttcgaaggttcgaatccttcccccaccaccattattcactacagcgatgtagttaactcgatgagcaatgcagaagtttgcacttgtcggggaagggtgagaaccttcgattaaggttcgactcgagcgaaagaacgttgccaacggtaacggcccgtagggtgaggagtgaagcgacgaataatccttcctccaccaccatcttcaagctttacctacaatttgaattacccctggtggggttcccgagcggccaaagggagcagactgtaaatctgccgtcatcgacttcgaaggttcgaatccttcccccaccaccatcgcttccgtcgcgtatcttatccccgttaagcatagtgtctcatatctctctgtacgggaaggatgagaagcttctaccagggttcgattcgagcgcagcgagaaagcgttgccgcaggcaacgacccgaagggcgaagcgcgcagcgctgagtcatccttcccccaccaccatcactcccgtcgcgtatcttatccccgttaagcacactgtctcatatctctccgtacgggaaggatgagaagcttcgactaaggttcgattcgagcgcagcgagaacgcgttgccgcaggcaacgacccgaagggcgaagcgcgcagcgctgagtcatccttcccccaccaccatcactcccgtcgcgtatcttatccccgctaagcacagtgccttatatctctctgtacgggaaggatgagaagcttcgactaaggttcgattcgagcgtcagcgagaaagcgttgccgcaggcaacgacccgaagggcgaagcgcgcagcgctgagtcatccttcccccaccaccatcactcccgtcgcgtatcttatccccgttaagcacagtgtctcatatctctctgtacgggaaggatgagaagcttcgaccaaggttcgattcgagcgcagcgagaaagcgttgccgcaggcaacgacccgaagggcgaagcgcgcagcgctgagtcatccttcccccaccaccataatctcccggcagcgcctcaatcaatcttcatcgcccccacaggcagacttcactccatggcgccatggcttattggttatcttatcaatacttcttcctggcaatctttttcgcctcctttgactgatcaatttttcgccagatgagattaaaggcggcatatgtctcgctaagttgatctggggtgagcgttcccttgagtcggtttctttcggcaatgagcgctgaacaatcatccttagatttttccgtatacatacttgccatgtaataccaaatataggcctgcttattatctttaggcacaccctggcgcccatgagcataaatttccccaagcgctgattgtgccggagtaaacccctgctctgccgctttgaggtaccacttcagcgcattccggctattttcaggcacgcctcttcccgtgctatatgctacgccaagctgatattgcgctttcgcaaaatcctgttttgctgcttttcgataccatgcgatagcctgtctgtcgctttgcgcgacgccgcgaccaaatgcagacatgatgcccagatgcgtttgcgcagcaggcagcccctggcgagcggctttgcgataccacgccagcgcctgttggtagtcctgagaaacgccctcaccctgcataaacatcacgccgatcgcatcctgcgcctcggccaatccttgcgctgcggctctgcgataccactccagcgccaggttgtgatctttcaataagtgataaccgttgtaataccatacgccaaaattgtactgtacctttgccatcacgcgttgcgctgtttttcgataccacgtctgagagtgaacccggtcagcgggatgcgctttatcatagagcgcattcagcggaatgtggcctggcgtatagctgcctggtataccttcattaagccagtaaactgcctgacgataatcctgaggcacgccttcaccataaaaataggcaacgccgagataaagttgcgcggggtagtacatattttccgccgctttacgcatcaagatcgccgtttgctgataatcctgaggaacgccctgaccgtgggcgtacattactccaagcttaaattgtgctgacgaagctgaaccctgtccgcggacaacgcccgcatcattggttggagaggcggcttttcgataccactccagcgctagctgggtattttggggaaacccatcgccatacatataggcgtcaccgaggatttcttgcgtactactatcccctagctctgccgccttgcgataccactccagcgctttttgtcgactaagtggaaaattttcaccatagttgtaatgatagccaaggatgaaataggaaaaatcagaaccttgtttacccgctttctccagccattttatggctagtttataatcaggcttaacgtatcgcccctccgcataccagcttccaagcgagaactgcgcgctttcatctccttgttccgctttttgctctaattcctgaacgtactggcattcttctgagtcggcgggatagcgctcctcgcagacagcagcgtgagccatttttgaaataaatatatttaatattattattttgaaaattgatgaaaaacgcatacaactatccttattgtcgtttatggcgtgattatatgctgcatcatcatttttctgcttacaaaaaactcgcacagatgctgaataaacccaaaaacaaagagtacggattcagatgccagacatggcagacccgctgtaaacgaaacaaggcggcggtcgataaggcatttatgccgcactccggcaaacagccataaaaaaactccgccgaagcggagtttagggcatcgagagaaaatcagtgacgtgcacgaacaatctggtatttgcgggtcagatactcgaccggcacgctccagatatgcaccaggcgcgagaatgggaacaacaggaacagcgtcatccccagtaccaggtgcatacggaagataaaggctacaccatccagatgtgcggatgcgccaccgtggaaggtcacaactgactgcgcccacccgaccagcttcatcatttcactcccgtccatatgctgggcggagaacggaatggtcagcaggcccagcgcgcactgaatcaccagcagcgagagaatcaaaatatctgcgccggtagtggtggcgcggacacgtgggctaaacagacgacgcttgagcagtaaaataccgccaaccagcgtcagcacgccgcaggcgccgccggcaatcatcgccatcttctgcttcacgtcgaccggcagaaaagcttcatacatccagtgcggcgttaacatgcccaggaagtgaccggcgaaaatacccagaatcccaatgtggaacaggtttgacgccaggttcattcctttgcgatccagcatctgactggaagccgcccgccaggtgtactggccgtagtcgtaacgtaaccaactaccgatcagaaataccgatccggcaatgtacgggtagatatcaaagaagaacatattcaggaagtgcattagtgctgtcctccggtggtgatattcagatattgcggcgccacggccccggcaaaacgacgctggtgagcggagatttccgactcgccacacccttgatcggcgaagaatttcacctgctcttcttcccagaccgcatccaacgcctgcggggtatcatcacgtgcttcattcgcaattttttcagccactttatcgctgtcgataacggtattcgccagttttaacagcagatcgaacagcaccgcataacggctgtcacgctgttgcaaacgtgcgctgagcagcgccagaatcggcgcgatatcctgtaaaccccctaacgcttcgcttttcggcaattgcgcaaggtattccagatacagcggcagatgatcgggaagttcgcgactgtcgagctgcaaaccgtgctgctcatactgtgccatcaggtcaaccatcgcctgaccgcgatcgcgggattccccgtgtacatgttcaaacagcagcagcgatgtggcgcgaccacggtcaaacagttcgctataagcggcctgtacatccagcaggtcctgcgcggttaaatcgcgcaggaaaacgcccagagtctgggcatcctctttatccaggttctcagatgacgcgagcgcatcgaacaactcctgctgatgctgccacagggcagcatccgggtactcgagcagacgcgaaacaatgacgagttcaatcatgcgtgcggctccgttttgctggtcacatcaacagcgtcgatgcggcggctgttgaacagattgaatttggtatcagacccgtggcaaccatcgccgaaggtaaagccacaaccgcttttctccgggaatgcgtcacgcgccagttcacgatggctgctcggcaccacaaagcgatcttcataattagcaattgccaggtaacgatacatttcctgcgcctgggcttcgcttaaacccacctcttccagcgcgcgggtatccactttaccgtctacggtttccgcacgtttgtagtgacgcatcgccagcatccgtttcagcgccaacagtaccggctgggtgtcgccagcagtcaacaggttcgccaggtactgcaccgggatacgcagactgtctacatccggcagaataccgttgctgccaagttcgcccgcatcggcggcagactgaatcggtgacaaaggcggtacgtaccagaccatcggtagcgtgcggtattccggatgcagcggcagcgccagcttccagtcaatcgccattttgtacactggcgattgctgcgccgcatcgatcacgctctgcggcacgccgtccttcagcgcctgctcaatgacagccggatcgtttggatcgaggaacacgtccagttgacgctggtacagatctttttcgttttccgtactggcggcgctttcaatggcatcggcgtcatacagcagtacgccaagataacggatacgacccacgcaggtttccgagcaaacagtcggctgaccagcttcgatacgcgggtagcagaagatgcacttctcggacttgccgctcttccagttgaagtaaatcttcttgtacgggcagccggtgatgcacatccgccagccgcggcacttgtcctggtcgatcagcacgatgccatcttcttcacgcttgtagatagcaccgctcgggcaggtcgccacgcacgccgggttgagacagtgctcgcacaggcgcggcaggtacatcatgaaggtgttttcgaactggccgtacatcgccttctgcatgttttcaaagttctggtctttagcgcgtttttcgaactcgccgcccagaatctcttcccagtttggcccgctggtaattttgtccatccgctggccggtaatcagcgagcgcggacgcgcgatcggctgatgtttgctttccggcgcggtatgcaggttctggtagtcgtaatcaaacggctcgtagtagtcgtcgatgcccggcagatgcgggttagcgaagattttacccagcagcagcgcccggttgcccatgcgcggctgtagcttgccgttaattttgcggatccagccgcctttccatttttcctgattttcccagtcattcggaaaaccaacgccaggcttactttctacgttgttgaaccaggcgtattccataccttcgcgactggtccagacgtttttacaggtgactgaacaggtatgacagccgatgcacttatcgagattcagcaccatgccgacttgtgaacgaattttcattttacgctctcctgtacctggtcattgccttcgccatccaaccagttaatgttcttcatcttacgtaccaccacaaactcatcgcggttggagccgacggtaccgtagtagttaaagccgtaggctaactgcgcatagccgccgatcatatgggtcggtttcggcgtaatgcgcgtcaccgagttatgaataccgccgcgctgctgggtaatttccgaccccggcaggtttacgatacgttcctgcgcgtggtacatcatggtcatgcccgccggtacacgctggctgaccactgcgcgtgcggtcaatgcgccgttgctgttgaagacttcgatccagtcgttatcttcaatgcccagatctttggcgtcggtttcgctcatccatacaatcgggccgccacgcgacaaggtcagcatcaacagattatcgctgtaggtcgagtggataccccatttctggtgcggcgtcaggaagttgagcgccttctccggattaccgttggatttacgccccatcaccgctttcaccgagcgggtgtcgatcggtgggcgatacaccagcaaactttcgccgaagtcgcgcatccactggtgatcctgatacaactgttggcgaccagacagcgtacgccatgggatcagctcgtgaacgttggtataaccggcgttataagaaacgtgctcatcttccagaccagaccaggtcgggctggagataattttgcgcggctgggcctgaatatcgcggaagcggattttctcttcttctttattggttgccagatgcgtatggtcgcgaccggtaaactcgctcagcgccgcccaggctttcaccgccacctgaccgttggtttccggcgctaacgtcaggatcatctctgccgcgtcaatcgccgtgttgagcatcggctggcctttcgccggaccgtccgctttggtgtaattaagcttacgcagcaagtccatttcgctctgcgtgttccaggcaatccctttcccgccgttgccgattttctccatcagcgggccgatagaggtaaagcgttcgtaagtcgccgggtaatcgcgctcaacggtcatgatgtgcggcgcggttttccctggaatcagatcgcattcgccttttttccagtctttcacgtccagcggctgcgccagttcagcggcagaatcgtgctggatcggcagcgtcacgacgtcagtctctttacccaggtggcctacacagacttcggagaatttcttcgcaatgcctttgtagatttcccagtcgcttttcgattcccaggccggatctacggcggcagacagcggatgaataaacggatgcatatccgaggtattcatatcgtctttttcataccaggtggcggtcggcagtacgatatcggagtacaggcaggtgctcgacaggcggaagtccagcgtcaccaccagatccagtttgccgtccagaccattgtcacgccactccacttcttccggcttcacaccgccctgtttacccagatccagcccctgaataccatgctcagtacccagcagatacttcagcatgtactcatggcctttaccggaagacccaagcaggttagaacgccagatgaacaggttacgcgggtggtttttaccgttttccggctgctcggcggcaaagcgaatcgaaccctctttcagggatttgacggtatagtctaccggcgtcataccggctttttccgcttcacgcgcaatatacagcgggttagtgcctaactgcggcgccgacggcaaccagcccatacgttcggcgcgcacattgaagtcaatcagatggccgctatagcgggatttgtccgccatcggcgacagtaattcctcggcggtcaccgtctcgtagcgccactggctggagtggttatagaagtaagaggtgctattcatgtgacgcgccggacgctgccagtcaagggcaaacgccagcggctgccagccggtctgcggacgcagtttttcctggccgacgtagtgcgcccagccgccgccgctctgaccaacgcaaccacagaacaccaacatattgatcagcccgcgatagttcatatcgaggtgataccagtggttcagaccggcgccaacgataatcattgaacgcccgtgcgttttgtccgcgttatcggcgaactcccgtgcgatacggatgatctgcgcccgcggcacgccggtgatctgctcggcccatgctggcgtatacgctttggtatcatcataactggcggcacaattttcatcgttcaggccgcgttccagaccatagttcgccatggtcaggtcatacacggtggtgactaacgctgaagaaccatcggccagttgcagacgttttgccggcagtttatgcagcaggacgttatccagcgccacatgattaaagtactctgaaccctcgccgccgaaatacgggaagcccacgtcagcaatctcatcctggctgcccagcaagctgagctgcaattcagtttctgcaccggtagtcccgtcgcgctgttcgaggttccatttgcctttttcgccccagcggaaaccaattgaaccgtttggcgctaccatttcaccgttgctgttgatagcgacggttttccattccgggttattttcctgccccagcgaatcaacgagatcggcagcgcgcagcatacgacctgcggcataataaccatcacgctcttcaagcatcaccagcattggcatgtcggtatagcgacggacataatcggtgaagtactggcgcgggttgtcgaggtggaactcgcgcagcatgacgtggcccatcgccagcgccatcgccgcatcggtcccctgcttcggcgccagccacagatcgcacagtttggcgatttcagcatagtccggcgtcaccgcgacggttttagtgcctttgtaacgtacttcggtaaagaagtgggcgtccggcgtacgggtttgcggcacgttagagccccaggcgataatatagctggagttgtaccagtcagcggattccggcacgtcggtctgctcgccccaggtttgcggggaggctggcggcaggtcgcagtaccagtcgtagaagctcaggcaggtaccgccaatcagcgaaagataacgtgcgccggaagcgtaggaaaccatcgacatcgccgggatgggtgagaagcccgcgacgcggtcagggccataggttttcacggtgtacacgttggaggcggcgatcagctcgttcacttcctgccatgaggagcgaacaaagccgccacgaccacgcgcctgtttgaagcttttggctttatcggcatcttcaatgatggaggcccatgcctctaccggatcgcgatgcagttttttcgcctcgcgccacatcttcatcagacgtttgcgcattagcggatatttcagtcggttagcgctgtagagataccaggagtagcttgccccgcgcgggcagccgcgaggttcatggtttggcatgtcaggacgggtgcgcgggtaatcggtttgctgtgtttcccaggtcaccagaccatttttgacataaattttccagctacaagaaccggtgcagttcaccccatgggttgagcgcacaattttgtcatgctgccaacgttggcggtatccgtcctcccagtcccggtttgtttcgagaagctggccgtgcccatcggcaaaggtttcgcccttctgcttgaagtagcgaaaccggtccaggaatttactcatcgggtttctcctgtgtggaaccttacggctctctgataaatcgacattgcttaactaagggcgaaggtaacgcgctgaatgggcgtgagaattgataacgatcaaggcggacagggatgcaaatggcgcgcaaacctcctgcatactcctttgggaggaggagttttatttatatatattactgatttaattacataaaattaaatttacgcacgacatgaatgttaaattttcaacaagtgggtattaaggggtatccccctggatgaccgataaagatgtgcgtggttagccctgccgcgtctctcttcttgattataagtatgttgtaactaaatacagataaaaaaaagcgcggtctaacgccgcgcaaaggataatcaaaagttactttttatttttagaatgacgtccatataccgcccaggtaataacgacgcaggcgatatagaaaataagaaagactttcatcgcgccgactggagaaccggttaatgctaaagatgaaccaaacgctttcggaataaaaaagccgccaatcgcgccaatcgcggaaataaagcccagcgccgccgccgtatcagttgccgcttcacgcatggctctttcttccgacccgccttccgcttttacccggtccattgtcagtttacggaagataacggagatcatctggaaggtagaaccactccccaacccagccgtcaggaacagcgccagaaataccccgtagaacgcgataaagctaccgccaacgccgccagtaggtaatgtcaggaacagcagaccgctgaaaatcgccatcaggacaaagttgataagcgtgacgcgagtcccccccagacggtcagaaattgcgccgcctgccgaacgcgccagcgcgccgataaacggaccgaaaaacgcataatgcaggatctgcacatccgggaattgcgttttagacagcatcgcgaaccccgcggagaaaccgataaacgatccgaaggtcgccagatacagcagactcatgatccacagatgaccacgtttgagcaccggcagttgctcttttagcgaggccttagacgtcgccagttcgttcatgccgaaccacgccgccagcgtaaaaatggccaggaaaggcacccaaatccaggccgcgttcgccagatagagctgagaaccgtccggctgctctacaccgtggctgccaaaggcggcaaagatagagagcgaaaccaccagcggcgcaaccagttgcatcacgctcacgcccatattgcccagaccaccgttcagacccagcgcgccgccctgcttttgtttaggaaagaaaaagctgatgttcgccatactggaggcaaagttcgcgccggcaaaaccacacagcaaggaaataataatgaaggtgctaaatggcgtactggtatcctgaacggcaaagcctaaccatacgcagggcacgatgaggataccggtactgaacgctgtccagcgacgtccgccaaatagcggcaccataaaggagtaaggcacccgtagcagcgcgccggaaacagatggcagcgcagtcaacataaagagctgatcggtcgtaaaattaaatcccactttcggcaggttcaccgccactgcgctgaatagcatccagacgcaaaacgccagcagtaaacacggcacagaaatccacaaattacggctggcgacacgatggccgcgctgctgccagaatgccggatcttccggacgccattccgtgataacagcgccagttgccctttccggggcggataagtgactcatagacacctctgattcttgatttgatgtctgccacattagggtttactgccgaaggtaagttgatataaatcaaaggaaaagtcgtcatcaccggcgactaaaaatagttattacccttaatgagtaggctattttggtaaaaaagctgtggtttttcaccatgctgtgtctgtctactccttcccgtcgcagatacctctctacagcggcaattaaggagtaactcgttataggtatgggtatactccgctgtatcgttgagaatagcggcacagccgattgacgcccctcttttttgctacgttttttcggcgacattaccccgaagaaagaaggtaacatgtttaaacggtgtttctctcctcttacgctggttaaccaactggcgctgattgtcatgctctctaccgctatcggcgtggcggggatggcggtttccggctggctggttcagggtgtgcagggtagcgctcatgcgattaataaagcgggctcattgcgtatgcaaagctatcgactactggcagctgtcccgctggatgctaaagatcaaaagctgctggatgagatggagcaaacggcattcagccctgaactgacccgcgccgctgagcgagacgggcagcagaagcagcttaaagcgttgcaggattactggcataacgaactctcgccagggctacagcacgcgcaaaacgcgcacgcggtcgcagaagatgtcacgcgctttgtggcgggcctggatcgcctggtgacgtcgttcgaccatacgactgaattgcgtatcgaacgcgtggtattagttcaccgggtaatggcgatctttatggcgctattgctggtatttacgattatctggctacgtgttcgccttttgcagccctggaaacagttgttatcaatggcgcgcgccgtcagtcagcgcgactttacccaacgtgccaatatcagtggacgcaatgagatggccgcgttgggttctgcgctcaataatatgtctgaagaactggccgaaagttatgcggtactggaacagcgcgtacaggaaaaaacagccggtctggaacataaaaaccagattctctcgtttttgtggcaagccaaccgccgactgcattcacaggctccgctatgtgagcgtctttcaccggtactgaatggcctgcaaaatttaacccagttgcatgatattgagctgcgggtctatgacctggaagatgaagataatcaccaggaatttacctgtcagtcggacatcagttgcgatgataaaggctgccacctttgcccacgtagcgccctgccgatgattaacggcggcaccaccttaaaatggcggctcaccgactctcacacccaatacggtattttgctggcgacgctgccctatggacgccatctcagccacgatcaacaacagttggtggacacgctggttgaacagcttaccgcgactctggcgctcgacaggcatcaggagcgccagcagcagttgattgtcatggaagagcgtgccaccattgcccgcgaactgcatgattctattgcccagtcgctctcttgtatgaagatgcaggtgagctgcctgcaaatgcagggcgacgtgttaccggaaagcagccgtgagttactcagccaaattcgcaatgagctaaactgctcctgggcgcaactgcgcgaactgttaaccactttccggttacagttgacggaacccgggctacgtccggcgctggaggcaagctgccaggagttcagcgcccggtttggctttacggtaaaactggattatcagcttcccccccgcctggtgccttcacaccaggcgatacacctgttgcaaattgccagggaagccctcagcaacgcccttaaacactctcatgccgacgatgtggtggtgacagtgacgcaatgtggcaaacaggtcaaactaaaagtgcaggataatggctgcggcgtcccggaaaacgccgaacgcagtaatcactacggcatgatcatcatgcgcgatcgggcgcaaagtttgcgcggcgattgccaggtacgccgacgcgagactggcggaacagaggtcactgttacttttattccagaaacaaacttcacagaaacccagggagatacccatgaataatcaggaaccggcaaccatcctgttaatcgatgaccatccgatgctacgcacgggtgtaaagcagcttgtgagtatggcgcccgatatcagcgtggtcggagaagccagcaacggtgagcagggtattgacctggcggaatcgctcgatcccgatctgatcctccttgatttgaatatgccgggaatgaatggtctcgaaacgctggataaattacgcgaaaaagcgctgtcaggacgtattgtcgttttcagcgtatccaaccatgaagaagatgtcgtcacggcgctaaagcgcggcgcggacggttatctgttgaaagacatggagccggaggacttgctcaaagcgttacaacaggccgccgccggcgaaatggtattaagtgaagcgttaacgccggtactggcggccagcctgcgggccaaccgcgccaccaccgatcgcgatgtaacgcaactcaccccgcgtgagcgcgatattctgaagctcatcgcgcagggattgccgaataagatgattgcccggcgtctggatatcaccgaaagtacggtcaaagtgcacgtgaaacatatgctcaagaaaatgaagctgaaatcgcgcgtggaggccgccgtctgggtacatcaggaacgcatcttttaattattgctcctggaacggttgccaatgcggattatcgtccggcatcgtgataaacggttcagtcagcgcgagcgtgatctcattggaagagacacgctgacctttttcatcctcaaccaccaccgataaacgccagcgatttgccgcgccttcgcggtgatcccaggccggcataatgattgtccagccctcggtactgcgggtgtccgttcctgccgtcaaacttaatgcctgtgtatcgccctgccagctcaaatgacgaataccgtgcacgctgcgcacctgcaattttaacgcaaccgtctcaccaggcgtaagatcccagggcggcgtcgccagaaaaaccgttaacgttttacgctgccgatactccattgtcggcagcgagttacgttgcggcgtatcatagcggctaccgcgtaatgactggctttgcgccacttcactggcggcaagctgctttttgagcggcacgccgaagcggtagttaagcgtcagccccaggttattttgactgaccccgctctcgccctgtttgtgctgggcggtcatggtaagcaaaggtactggcgtatagttgagacccagttttaacgcgacaggattgtgataccccgttccggagtcaaacagatccacgctatcgccaaagtactgctccagactaacgctggtattgatatgctggtaaaacggcaggcgcatttgcgcgttgatatcatatccgcgcgccattcgctgttctaaggtcgccgtatgcgtctgccagtcggcaaaaggctgataatagttggcggataaacgcaaatattctccccacgcctccgcgccaaagccggcgcgctgtagattttcatccagcagattatcgtaaaaggtattatagccaagaagccagccatcctgcgcccagcgctgtcctacgccaatgttgcttaccagtccgtcagtctgttgcgtaagaccaagctggctccaggtcagatagcgctgtttatcctgtaaagggataaaccagcttccgcgactgccgttaaaatgaccttcgttatcgacgttaatatccacgctggcgctgccccaggctgatagccagctttcaagctgctggttaacctgctcgctgaccacatcgcgtacctgtccgaaagcgaattgccgcgcctgttcaccagtatccagatcgttatttttcatgctggcttcgccaaacgctttggccatctcggcaaaatgcttttccccttcgtgggattccggcatcatgcctaaatccggcagacggttttgcgtgaaaggatcttgcgcctgcgcacggatcgtaccgctggcagccagcaagagaagcgagagtgagaatgaacgaaaaacaatacggctcaacgtgtcggcaacttctacaacaaaagataagaggaatgacatcagagtaaaccataacgtgtccggacaggttttgcagccttttctcgtgcttccaggaatatccttattttttccgcagagcgtcccgggattttatccacgcatttggcggtacccggttcccgaggtaacataacgccattgccgacaaaatttctcaaggagaagggttatccatgcaaaatatcgtcattatcgctaacggcgccgcctacggcagcgaatcattatttaatagcctgcgtctggccattgcgctgcgcgagcaggaaagccatctcgatttacgcctgtttttgatgtcagatgccgtaaccgcagggttacgcggtcaaaaaccagccgaaggctacaatattcagcaaatgctggaaattctgaccgcgcaaaacgtaccggtaaaattatgcaaaacctgtgcggacggacgtggtatcactcccctgccgctgattgacggtgtggaaatcggaacgctggtcgagctggcgcaatggacgctggcagcggacaaagtgctgacattttgaatctgtacgcgggaaaagctcccgcgtcaggatagacttccggcaagaaaatcaggctaacacgcgagtaataccgcgtttattttttcttatgccatttatcatcctcgcctttttcataatcgtttttaaccgccgcccaggcgactttgtgtgcggtttcctcgcggctggcgtcatcacgacgatcggctttatctttatattgctcccaggcgctattaaacgcttctttgtaaatgtcctgggcatgggctggaagaacattccgcacattatcgggtaaatcacttttggctttatacggcatcagcgcctccgtcttcagggaaaacattaagtgtggtaaacaatgcgttattacgccagtcgaggaggatttttgctttttacggaaattaactttttgttatttaaacactgttaaaacaagatgcttgttttactgaccttgaaagaaaaaaatcgtctacgccgtaaaactacgtaaaaaaccactaaaaaaatacaaatttctgctatttttaccttctttactctttccaaaatattaacacctgcacaagggagaccctcatgacacatgcctgtgaggcggtgaaaacccgccataaggagacttcgcttattttcccggttcttgcgctggtagtgctgttcctttggggaagcagccagtcactaccagtggttattggcatcaatatccttgcacttattggtattttaagcagcgcatttagcgtggtccgtcatgccgatgtattagcgcatcgactcggcgaaccctatggatcgcttattttaagcctgtccgtcgttattcttgaggtgagtttaatttccgcgctgatggctaccggcgatgctgcgccaacgcttatgcgcgatacgctctactctattattatgattgtcaccgggggactggtcggtttctcgttgttgttgggcgggcgtaaattcgcaacgcaatatatgaatttatttgggattaagcagtatcttatcgcgctgtttccgctagcgattattgtgctggtttttccaatggcattgccgcaagccaatttctctaccggtcaggcattattggtcgcgttaatttccgccgcgatgtacggcgtatttttgttgattcaaaccaaaacgcaccagagcttatttatctatgaacatgaagatgaaggcgatgatgacaatccacaccacggtaaaccctccgcgcacagtagcggctggcatacggtctggttactcattcatttaattgcggtcattgccgttaccaaaatgaatgccagcccgctggaggcgttgctgaccagcatgaacgccccggtcgcctttaccggtttcctggtcgcgctgttaattctctcgccggaaggactgggcgcgctgaaggcggtactgaataatcaggttcagcgggcaatgaatctgttcttcggatcggtgttggcgacgatttcattaaccgtgccggtcgtcacgctcatcgcctgggcgacaggtaatgatctggtgtttggtttaggcgcgccggaaatggtagtgatggtggcctcgttagtgctgtgccatatttcgttctctaccggacgcaccaacgtgctaaacggcgcggcgcatctggctttatttgccgcctatctgatgacgatttttgcctgatataaaaaagccggatagtatcttatccggcctacacaagctaaaaaccgcaatcagttctcggtatccagctcgtcgaagcttttcaccaaatcatcaatcgcttttatctgggtcaggaactgctccagtttcgccagcggcagcgcggaaggaccgtcgcacttcgcgttagccgggtccggatgcgactccaggaacaggcccgccagaccgacagccataccggcgcgcgccagctcggtcacctgaccacgacgaccgccagaggcggcgccaaatgggtcgcggcattgcagcgcgtgggtgacgtcgaaaatcactggcgagttgccggagacctttttcatcacgctaaagcccagcatatccaccaccaggttgtcatagccgaagttcgcgccgcggtcgcacagaatcaccttatcgttaccgccctcatggaacttatccacaatattgcccatctgacccgggcttacgaactgcggctttttcacgttaatcacagcgccggttttcgccatcgcttccaccaggtcggtctggcgcgccagaaacgccgggagctgaatcacgtcaaccacatcagcaacaggctgcgcctggctggcttcatggacgtcagtgatcacttttacgccaaatgtctgcttgagttcctggaagattttcatcccttcttccagacccggcccacggtaagagtgaatagaggaacggttggctttatcaaaagaggccttgaacacgtaaggaatacccagcttctgggtaacggttacgtagtgctcacaaatgcgcattgccagatcgcgtgactccagcacgttcataccgccaaacagcacaaacggcaggtcatttgccaccttaatgtcgccaatgttaaccactttttgtttcataggatcgccttacacttataggtaaaatgtcggttaattaatgtagaacaatttgcttgtgcgcaatggtgttgatctgcgcacgaatcatttcgctgatcgggtcttccggacactgttcaacgaagtagcttaaatcagtcagcgcaacgtgttcacactcaagctgcgcgtagatcaacccgcggtcacggatttcgtaaggatcttccgggttaaattgcaacaatgcttcgctaacgcgcagcgccagctccatttgccgttcctccatcagcgaggatttcagcgtatccagtagcttacgaatcacttcggcgttatccgcttcgtccaaatcttcattaaacaactcggcgaccggactaatattgccttttaaccagacttccagagtatgttcatcaagcgtttcaccgttgaacgggttaatcagccacatttccccttccagcgattcaatacgcaaaatcaactgcgttgggaagataacgggcaccaacggcaaatcaagacggtttgctatccataataaaatagcgcccaacgataccgcgctcccctggcgttttttcaggactttatcgagccataaagcatcagaaagacggtagacgccgcgggaatccgtgaacccccactcgccgtaaaaaagtgccagcaatttttccagttgctcatcctgagacaggagctggctaatttcttcctgcgccagactgaccagacgttccagttcgtcgtagacaaactgcgtgggaaaatccaggcgaatcatctctgatgccaggatcatgccatcacacagcggcgcattgttaaattcgaaatcagctaacgacctcatgacttaccccagtaacggtatttttgtggtggcgagtttaatgatgatgtacagcaccaccagcgccagcgggaaagcgataaaacgcgcctgctggctgcgcgcctgacgataatcaagcgcaataaaacccaaaacgatgtagatgataacgccaaacagtttttcagtcagccatgagcccgactccgtgaatggcaggatgtgcgttttaacgattaacccaataccgctaagcagtaacagggtatctatgacgggaggcacgattcgtgtccagcgcgcggcggccaacgcatggccgcaatagcgccaccagtaacgagcgacaaacaaactgacggagagcgcaacacagataagatgaagcgtgagcaacattgcaattgtcatggcgtaaaacgtccgcaggtcacgcgttcattaccaccataatcacgacacgtttctacatccgagtaaccagaccgcctgaaaaccgctcttaccgcttcgccctgctgccaaccgtgttccagcagcaggaagccgccgggcgttaacatctggcgggcgttatcgataatatgcgtaagatccgccataccgttttcgtccgccaccaacgctgagcgcggttcaaagcgtacatcgccttcgctaaggtgcgggtcctgcgcgtcaatgtagggcggattgctgacaatcatgtcgaactgctgccccgatagcgcgctgaaccaacaactttgcagtatacgcacattccggatagccaaatgttccgcgttgcgtatcgccagcgcaaccgcatcaggcatacgatcgaccgcagtcacctcgcaatccggtcgctcgcaggccagcgccagcgcaatcgcgccggttccggtgcctaaatccagaatacgacaggtttttaccggcaatcgcgccaacgcctgttccaccagacattcggtatccgggcgcgggattagcgtggcgggagaaacgaagagcggcagcgaccagaattcgcgtaagcccgtcaggtacgcaataggttcgccctgtttacgccgctgcagcaggtccgcgagctgttgttgctggacgtcggtaagcggcgtttcgccaaaggccatgatatacgtccgccccttgcccgtaacgtactctagcaggatctcggcgtcgcgccgggggctgtcgctgtcccggagctggtttaccgcctcatgcagccagtgctgaaaatccattattcctgctcggataaggcggctaacaggtcagcctggtgttcctgaacaatcggctcaatcagcatatccagcttaccttccatcgtttcatcaaggcgatataacgtcagattaatacgatgatcggtcacgcgcccctgcgggaaattataggtccggttacgatcgctgcgatcgccgctgccaagcagattgcgtcgcgttgacgcctcggcctgctggcgttttgccgtttcggcggcgtgaatgcgcgccccgagcaccgagagcgctttcgctttgtttttatgctgcgaacgctcgtcctggcattccaccacgatgccggtcggcaagtgggtaatacggatagcggagtcggtggtgttaacgtgctgaccgcccgcgccggaagaacgaaacgtatcaatgcgcagatccgccgggttaatatccggcagctcggcttccggcagctccggcatcacggcgacggtacaggcggaggtatggatacgcccctgcgactcggtcgccggaacacgctgtacgcggtgtccgccggactcaaatttcagtcggccatacacgccgtcgccgctgattttggcgatgatctctttataaccgccatgctcgccttcgctcatgctcatgatctccacgcgccagcggcgcgcttcggcataacgactgtacatgcggaacagatcgccggcaaacagcgcggcttcgtcgccgccggtaccggcgcgaacctcaaggaacgcgtttcgttcatcgtccggatctttcggcagcagcagtacctgtaactgttgctccagttgttcgcttttttctttcgcttcgcgcagttcttcctgcgccatttctcgcatttcaggatcgtcgagcatcatctgagccgtctcgatatcgtcctgaacctgttgccagtccgtaaaacagcgagaaacgtcgcttaattgcgcatattcgcgcgacaatgcgcgaaagcggtcctggtcggcgataattcccgcatcgcccagcaacgcctgaacttcctcatggcgttcgtgcagggcttccagtttggcaacgatagaaggcttcataggcgtaaattcaccctgtaaaaaagtgtggtgtgtgctgctactccagcccgaggctgtcgcgcagaatattcaggcgttcgtcatccccgtcacgggcagcctgttgaagtgatttcgttggcgcatgaatcaggcggttggtcagtttccatgccagatcctgcaagatggcttgcgcatcaccgccctgttgaagggccgacagcgctttggtagtcagttcgtcacgaatctgctccgactgactacggtattcccgaatggtctcgctggccccctgggcgcgtagccaggccataaactcgctggcttcctgctcaacaatcgtttccgcttctactgccgcagcctgacgctgcgccagattatgcgaaatgatgctctgtaaatcatcgacgctataaagataagcgttcgccagtttgccgacttccggttcaacgtcgcgcggtacggcaatatccaccagcagcatcggctggttgcgacggctttttaatgcgcgctccaccatgcctttaccgataatcggcagcgggctggcggtcgaactgataataatatcggcatcctgcaaacgggcgtcgatatcgctgagcgagataacctcagcgcctacctcatccgccagggcttgcgcgcgctcgcgggttcggttggcgataatcatcttttgtactttatgctcgcgcaggtgacgcgccaccagttcaatggtttcgcccgcgccaactaacagtacggtgaccgtcgagagcgattcaaagatttggcgggcgagcgtacaggcggcaaacgcgacggagacggcgctagcgccgatatcggtttcagtccgcactcgcttagcgacggaaaaagacttctgaaacattcgctccagcgcgctggcgttaaggtggcctttttgcgaatccgcaaacgcttttttcacctgaccgaggatttgcggttcgcccagcaccagtgaatccagaccgctggcgacgcgcatcaggtggctgacggcgtcattgtcctgatgccagtacagactgttgcgcagatcgtcctcgttcaggttatggtaatcgcataaccagcggatcagcgcttcttgcaggttatcctgctcttccacgctcagatacagctctgtacggttacaggttgacagcacgaccccgccctgcaccattggctgcgcaagcaggctgtccagcgcctgatcaagcgtgtccggcgaaaacgttacgcgttctcgcagcgatacaggtgccgttttatggttaataccgagcgctaaaagggtcatgtctgcgggagtagtaccagcgttgatatggttagtctgcttgcatcatacaggatgcgcgtggtcaataaaagagagagcccccttttggagtaattggcagcgctcgctaatttgatgatttaagacaacttgaaagtagacgatgtcaccaggcggcgctagcattaaaggctataactgtaaccgatagcaaaaatttgccgaatcgcggcgcgaacgtttttacagcctgcaggttcagttttcaggcctgataagcgtaacgccatcaggcaattattgcaccgtatcacaaggattcgtcatcactatgaccctgcccgattttcgcctgattcgtctactgccgttagcaagcctggttctcaccgcctgtacgcttcctgggcataaaggcccgggcaagagcccggattcccctcagtggcgccagcatcagcaagaggtgcgtcatctgaatcaataccagacgcgcggcgcctttgcttacatctcagatgatcagaaagtctatgcgcgtttcttctggcaacagaccggacaggatcgctatcgcctgctgctcaccaatccgctgggcagcaccgagctggagcttaacgcccagccgggcaacgttcagttggtggataacaaaggccagcgttataccgccgatgacgccgaagagatgatcggcaaactcaccgggatgccgattccgttaaacagcctgcggcagtggatcctcggtctgcctggcgatgccaccgactacaaactggacgaccagtatcgcctgagcgaagtgaactatcgccaggatggtaaaaactggaaagtggtttacggtggctatgacagcaaaacgcagcctgccatgcctgccaatatggagctttcagacggcagtcagcgcattaagctgaaaatggataactggattgtgaaatgatgacccattggccttctccggcaaaattaaatctgtttttatatatcaccggacagcgagcagacggctaccacacgctgcagacgctgtttcagtttctggattatggcgacacactccacatcgaaccgcgtcacgatggcgaaatccatttattaacgccggttaacggcgttgaaaatgaagacaatctgatcgtccgtgccgcgcggctgttgatgaaagtcgcctcggagagtgggcgcctgcccgccggaagcggtgcggatatcagcattgagaagcgccttcccatgggcggcggtctgggcggcggctcatctaacgccgcgaccgttctggtggcgctcaatcatctttggcaatgcgggctttccattgatgaactggcgacgctcggcctgacgctcggcgccgacgtcccggtctttgttcgtggccacgccgcgtttgccgaaggcgtaggcgaaatattaacgccggtgaatccgccggaaaaatggtatctggtcgcgcaccctggcgtaagcattcccacaccggttatctttaaagatcctcaattgccgcgtaatacgccaaaaaggtcaatagatacgttactaaaatgtgaattcagcaatgattgcgaggttatcgcaagaaaacgttttcgcgaggttgatgcggcgctttcctggctgttagaatacgcgccgtcgcgcctgactgggacaggggcctgtgtctttgctgaattcgatacagagtcttgtgctcgccaggtgcttgagcaagccccggaatggctcaatgcttttgtggcgaagggtgtcaacctctccccattgcatcgagagttactctaacgcattcgggtttcaggaagatggcgaaatgacgagtcgccggtcatatatgccgtatttgaccggtgtgaggcatcgataccagcgcacatgaaacgtgaatgaagacgagtaagccgggcaagctgagcttcggtgacaacgtcaccttgttccagacgttgcatcgcgctctttaatacaccgcctggataggattttgcctggcccgcacagttttcggcagattctttccaccaatggacgcatgcctgaggttcttctcgtgcctgatatgaagctttttgctggtaacgctaccccggaactagcacaacgtattgccaaccgcctgtacacttctctcggcgacgccgccgtaggtcgctttagcgacggcgaagtcagcgtacaaatcaacgaaaatgtacgcggtggtgatattttcatcatccagtccacttgtgccccaaccaacgacaacctgatggaattggtcgttatggttgatgccctgcgtcgtgcttccgcaggtcgtatcaccgccgttatcccctactttggctatgcacgtcaggaccgtcgcgtacgttccgcccgtgtgccgattaccgcaaaagttgtcgctgacttcctgtccagcgtcggcgttgaccgcgttctcaccgtagatctgcatgctgaacagatccagggcttctttgacgttccggttgataacgtgttcggtagcccaatcctgctcgaagatatgctgcaactgaatctggataacccgatcgtggtttccccggatattggcggcgtggttcgtgcccgcgctatcgctaagctgctgaacgataccgatatggctatcattgataaacgtcgtccgcgcgcgaacgtttctcaggtgatgcacatcatcggcgacgtcgctggccgtgactgcgtgctggttgatgatatgatcgataccggcggtactctgtgcaaagcagcagaagcattgaaagaacgtggcgctaaacgcgtgtttgcctacgcgacgcacccgatcttctcaggcaatgcggcaaacaacctgcgcaactccgtcattgatgaagtcgttgtctgcgacaccattccgctgaccgacgaaatcaaagcgctgccgaacgtgcgtaccttgaccctgtcaggtatgctggccgaagcgattcgccgtatcagcaacgaagaatcgatttccgccatgttcgagcattgatcgaacccggatctgaaacccgctgcggcgggtttttttgtctgtaacacccttttgtatgacttatgcctccttcacctgccatttagttgacagatgatgcgctcatggatgaaacattattgtgaacaaattattttcctcacatgtgatgcctttccgcgctctcatcgatgcttgctggaaagaaaaatataccgcctcccggttcacccgtgatgtgatagccgggatcaccgtcgggattattgctatcccgctggcgatggcgctggcaattggcagtggcgttgcgccgcagtatggcctctatacctccgctgtcgccgggatcgtgatcgcgctaaccggcggctcgcgctttagcgtttccggccctaccgccgcgtttgtggtgattttgtatccggtatcgcaacagtttggtctggcgggcctactggtcgccacgctgatgtcgggcttcttcctgatccttttcggcctggcgagactggggcgattgattgaatatatcccggtgtcggtcacgttgggttttacctcagggattggtattaccatcggtaccatgcagattaaagattttcttggtctgcagatggcccatgtgccagagcactatttgcagaaagtcggcgcgctgtttatggcgttgcccaccgtcaatattggcgatgccgccattggcgtggtaacgctgggaacgttgattttctggccgcgtctcggtattcgtctgccaggacatcttcccgcgctgctggctggttgcgccgtgatggggatcgttaatctgctgggcggcaatgtggcgactatcggctcacagttccattatgttctggctgacggcactcagggcaacggcatcccgcagctcctgccgcaactgatgctgccgtggagtcttcctggctccgatttcacgctaagctgggattcactgcgcgcgctgctgccagcggccttctcgatggcaatgctgggggcaatcgaatcattgctctgcgccgtcgtgctggacggcatgaccggcaccaaacataaagctaacagcgaacttatcggccaggggctggggaatatggtcgcgccgttctttggcggcatcaccgccaccgccgcgattgcccgctctgccgccaacgtccgcgctggcgcgacctctcccatctcggcggtaattcacgctatcctggtcattctggcgctactggtcttggccccgctactctcctggctgccgctttccgcgatggcggcgctactgctgatggtggcatggaatatgagtgaagcccataaagtggtggatctgttacgccatgcgccgaaagacgacattatcgttatgctgctgtgcatgtcattaacggttctgtttgatatggtcatcgccatcagcgtggggattgtccttgcttccctgctgtttatgcgccgtattgcgcgtatgactagacttgcgccggtcaatgtcgatgtgcctgatgatgtgctggtgctgcgtgttatcggtccgctctttttcgccgcggcggaagggctgtttaccgaccttgagtcacgtattaagggcaaacgtatcgtcgttctgaaatgggacgcagtaccagtgctggatgcaggcgggcttgatgcttttcagcgttttgtgaagcgtctgccggaaggttgcgaattgcgtatcagtaacctggagttccaaccgctgcgcacaatggcgcgtgccggtatcaaacctattcctgggcgtctgaccttcttcccgaacaggacggaggcgttagcggatttactcagttaatggacaatgcccggtggcgataacgcttaccgggcctgaaccggttagctatgacgacgattgtcgttacggcggcaacgtttgtcatagtgacgtacccaccaatatttgtcgctcacctgctcatgcccccctacacgagcccccgccagccaaagaactgcaccgacaaaaatgctcagtattgcgccatgcgcaaaaaattgcggcaaattaaactgcggcagttggtttaaaatagagtaacccacgccgacaaccatcacgaccagccccaaccccatcagcacgttaccgaataacgaagcgtttttgcgtttcatatgtcacctccggaacttttgggttgtttttaggaaatccccctaaactttatgtgtaaagtatagacaacactttcgtttgtaagtgcgggtgcgatcacaaatgtaaagtttcatttaacaaaactttacaaataacacactgaacagtttacatttttaataatcaatgctggcaattatttaatttacttcagagtgtcgctgtgttttgtcaagcgggcagacagacagtaaactacgcgccagttatggatctactcaggacaaaaaacgtggcaattaaattgattgttggtctggcgaatcccggtgcggaatatgccgcgacgcgacacaatgcaggcgcatggtacgtcgatttactggcggagcgcctgcgcgcgccgttgcgtgaagagcctaaattctttggctatacctcacgcatcacgctggaaggggaagatgttcgcctgctggtacccaccacgttcatgaacctcagtggtaaagcagttggcgcaatggccagtttttaccgtattcagccggacgaaattttggtcgctcacgacgagctggatctccctccgggcgtcgcgaaatttaaacttggcggcggccacggcggccacaatggtctgaaagacatcatcagcaagctgggcaataatcccaactttcaccgattacgcgttggaattggtcatccaggcgataaaaataaagttgttggtttcgtgctgggtaaaccccctgtttctgaacaaaaattaattgatgaggccattgacgaagcggcacgctgtacggaattgtggttcaaagagggtctggccaaagcaacaagccgtttgcatacctttaaggcgcaataaccagtgatgtgcggcatttttgccgcacgccgtgtataataggcgaagttatttccatttctgcaatctgttttctataacaggttgattattaagatattaaggtgagttaaatcatgggattcaaatgcggtatcgtcggtctgcccaacgtcgggaaatccaccctgttcaacgcgctgacaaaagccggtattgaagcggcaaactttccgttctgcactatcgaaccgaataccggtgtcgtgccgatgcccgatccgcgtctggaccagttggctgagattgttaaaccgcaacgcattctaccaaccacgatggagttcgtggatatcgccggtctggtaaaaggcgcgtccaaaggcgaagggttgggtaaccagttcctgaccaatatccgtgaaactgaagctatcggtcacgtggttcgctgctttgagaacgacaatatcatccatgtggcgggtaaagtaaacccggcagaagatattgatgttatcaataccgaactggcgctggctgacctcgatacctgcgagcgcgctatccatcgcgtacagaagaaagccaaaggcggcgataaagacgccaaagcggaactggccgcgctggaaaaatgcctgccgcacctggccgaagcggggatgctgcgttcgctggacctgacggacgaagataaagcggctatccgttatttaagcttcctgacgctgaagccgacaatgtatatcgctaacgtcaatgaagacggttttgaaaataacccgtatctggaccaggttcgcgaaatcgccgccaaagaaggttcggtcgtggttccggtgtgtgccgccgtcgaagctgatattgctgagctggatgatgacgagcgcgacgaatttatggctgaactgggtctggaagagccggggctgaaccgcgttattcgcgctggttatcgcctgctgaacctccagacctacttcaccgccggggtgaaagaggttcgcgcatggactattccggttggcgcaaccgcgccgcaggcagcaggtaaaatccataccgacttcgaaaaaggctttatccgcgcccaaactatcgcttttgacgactttattacctataaaggtgaacaaggcgcgaaagaagccggtaagatgcgagcggaaggcaaagattatatcgttaaagatggcgatataatgaacttcctgttcaacgtctaaataaaatttgttgtctcgtgaggttttgctgaatctcataagaggcaaagaaagtcataaaatccacgcagccgcgtggattttttatttcataatatctcaactcatactgacaggctcaattaacgcagagctaacagggtaagttcttttcttaattaccagtcgacattcactgtatggttataaaaaggatgctgatcctttagcggcgtctcataacttgggatcgcatcataatcatcttttccccgaacggaataccttcccgcttcgatatcaaaacgatgtttgagccatcccgcaacatgacttgcgaaagcctcttttcttcttaatggccaatcgacagaagccaaattaacatctaataagtaccgcccttctttattaaccttgatcattccagcctgcagtaacgcccgtaccacctgggattggttatcatgaatccagacccaggcatttccaaattccattgcataactatcatttaaaaaatctttttttgaatataattcacttacataatcattgatagagtcagcataattttttactttagatgcagataaatcaaaaaaagattcaaattcgaaagtattgtcattaatacaggacagtaacgcacccggttccgagagctgggtccatgattgtaaactctctacagctataatgaatttgaaagtatttcttccaatgacaccccggtcaattaaagttaaaatatcgtgagctacggtagggatatcttctgcaaacgggacgattatccccgcaccacttatttcgcttgatctaaaatcaaatcctggggtactttcaatgttttccggaataccatactctttaatatgattaaggaaattattaatatcgccacgatatggccatcgccattcacgttcatgtgtccagtcaatcttacctggaacataagtaacatatctatattgttcaatcaaaggaagagccgtttcatcaagaatacgttccccgtttctgccttgcgagcatcgagcattgttatgctgatccaacccatatatgactggccttgccccataattaaacatttgctctttaggtaaaacgattgcatataaaccgattttttcatttcgttctaatcggcgaacaccagtctctaaataagctgcaatcggcatatctgtaaagcataccaccggggagtcaccatatacggttcgttgcccatttcggtatgaccaggacgagaaaattttatgactgcgtaaagataatcgaagtaaatatttagcatcaatgaaacatgcgtggtgctgattattaaaaccacagtgctcaggcaaataaatatggctaccggtctctaaattaacgtcccgaaaaaaatgaatcaaataatcggataagtcaaatctgatgttatttttcatgggacgccctctttcaaacagtctcttttttgcattcctttaaaaccagcatcactattttatataaaaatcatcacgaagtatgcttcttttaacgatgacctcaaatcctccccccttttgcatcaacttacgcatccctgaaatggcgagaacaggctaaatctacccgaggtcactcgctaaaaacctcatcctggaacaagctcaaccgcccttccccgctacggccctttcgccgaaaaaccgataatgggtataaatataccgctataagctatacccacacacttcacattgtttcttatcgttaatccgatacgcttttttcacattatttctggcggtatacgccggtgcaaagtgaatcgggctcgtttccgcgctcgcgcgtaacacaatgatttaccttgctggcggaacgtcaacggacccgcaaaagcgccttatgcccctggcggagcgtggtgcaaaaaggagaaaaaatacgcgttatgaataacgaggagaccttttatcaagccatgcgtcgtaagggagtgacccgacgcagctttctcaaattctgtagccttgccgccacatcgctgggactgggcgccggaatgacgccaaagatcgcctgggcgctggagaataaaccgcgaattccggtggtctggattcatggactggaatgcacctgctgtaccgaatcctttatccgttcctcgcacccgctagccaaagatgtgatcctctcgctgatttcccttgattatgacgacaccctgatggccgccgccggcgcacaggccgaagaagtctttgacgatattaccactcgctacgccgggaaatacattctggcggtggaaggcaatccgccgttaggagagcaaggaatgttctgtatcagcggtggccgcccgtttattgaaaaactgaagaaagccgccgcgggcgccagcgctattatcgcctggggaaactgcgcctcctggggttgcgtccaggccgcccgccccaatccgacccaggcaacgcctatcgataaagtgatcaccgacaagccgatcgtgaaagtccctggatgtccgccaatcccggatgtcatgagcgccattatcacctatatggtgacgtttgatcgtctgccggaactcgatcgcatgggccgtccactgatgttctatggtcagcgtatccacgataaatgctaccgccgcgcccattttgacgccggtgaatttgtcgagagctgggatgatgacgccgcccgcaagggatactgcctgtacaagatgggctgtaaagggccaaccacctataacgcctgctcctccacacgctggaatgacggcgtctcctttcctatccagtccggtcacggatgtctgggatgctcagaaaatggtttctgggatcgcggctcgttttatagccgcgtggtggatattccccagatgggtacccattcaaccgccgatacggtggggctgaccgcgctgggcgtggtcgcggcgggcgttggcggtcacgctgtcgccagcgcgctcaaccaacgtaaacgccacaaacaacagttagcgcaagccgaacaacagccggacaatgaggataaacaggcatgagtaaccagtatcaaacccagggttataccgttaacgacgccggccgtcgtctgatcgtggacccgattacccgcatcgaagggcatatgcgctgcgaagtgaacattgatgagcaaaacgtcattaccaatgccgtttcctgcggcacaatgttccgcgggctggagatcattctgcaaggccgtgacccgcgtgacgcctgggcgtttgttgaacgtatttgtggtgtatgtaccggggtacatgctctggcatcggtgtacgctatcgaagatgcgattggtatccaggtgccggataacgccaatattatacgtaacatcatgctggctacgttgtggtgtcacgatcatctggtccatttttatcagttagccggtatggactggattgatgttctgaatgcgctgaaagccgatccgcgcgccacctcgcagttggcgcaaagcctttccgcctggccgatgtcatcgccgggctacttctttgacgtacaaaatcgattaaagaaatttgtcgatggcggtcagcttgggatattccgtaacggctattggggacatccacagtacaaattgtcgccagaggctaatctgatgggctttgcccactatcttgaagccctcgacttccagcgcgagatcgtcaaaatccataccatatttggcggtaagaacccccatcctaactggatcgttggcgggatgccgtgcgcgatcaatctcgatcaaagcggcgcggtcggggctatcaatatggagcgcctcaacctggtgcagtcgatcatcacccgcaccgccgactttattaacaacgtgatggttccggacgcgctggctatcggccagttcaataaagcatggagtcaaattggcaccggtctgtcggataaatgcgtgctgagctacggcgcatttccggacattgccaacgacttcagccagcaaagcctgttaatgccgggcggcgcggtgatcaatggcgattttaaaaatgttatgccggtagatttggccgatccgcagcagatacaggagtttgtggatcacgcctggtaccgctatccggacgatcggctgggccgtcatccttttgacggcattaccgatccctggtacaacccgggtgatgtcaaaggcagcgatacgcatatccagcagctcaacgagcaggaacgctactcctggattaaagcgccgcgctggcggggtcatgccatggaagtcggcccgcttgcccgaacgcttatcgcgtatcacaaaggggatgccgccaccatagagtcggtagatcgcatgatgtctgcccttaaactgccgctctccggtatccagtctacgcttggccgtattttatgccgcgcgcacgaagcgcaatgggccgtcggtaagctgcagtattttttcgacaggcttatgaccaacctgaaaaacggcgacctggccaccgccaataccgagaaatgggaaccggccagttggccgcagcactgccgcggcatcggttttaccgaagcgcctcgtggagcgttgggacactgggcgtcaatccgcgatcagaagattgaactctatcagtgcgtggtccccaccacctggaacgccagcccgcgcgatcctaaaaaacagatcggcgcctatgaagcggcattgatgggaacgcaaatggcgattcccgaccaaccgttagaaatcctgaggacgctgcacagcttcgacccctgcctcgcctgttcaacccacgtgctcggcgacgacggcagcgaactgattgccgtccaggtacgctaagcgttaaggaaaagaacgatgactggaaagctatctccacgcgtcggggaggcgcgtgatactgccgtcagccactatgtgtttgaagcgccggtacgcctgtggcactggctaacggtggcctgcatgttggtactgatggtaacaggctacttcattggccggcccttgccgtcggtgagtggcgaggcgacctatctgttttacatgggctatatccggctgatccactttgccgccgcgatgatctttaccgtgttactgctggggcgaatttattgggcctgtgtcggcaaccgctattcacgagagctgtttattgtcccggtctggcgtcgtagttggtggcaaggcgctttcaccgtggtccgctggtatctgtttctggagaaaaaaccggggagcgacatcggacataaccctgtcgcgcaggccgcgatgttcggctatttcctgttgtcggtatttatgatcctcaccggtttcgctctgtttggcgagcatagccagtacgccatctttgcgccgttccgctatgtggttgaatttttctactggaccggcggcaactccatcgatattcacagttggcaccgactgggcatgtggctgatcgccgccttcatcgtcgggcacgtttacctcgctatccgggaagacattatgtccgacgatacggtgatctccaccatgatcaatggctatcgcagccataaattccccaaaccgcacgacaaggagccctcatgaatgcgcaacgcgtagtggtgatggggttaggaaacctgctgtgggccgatgaaggattcggtatccgggtcgcggagcgtttgtatgcccgatatcactggcctgaagaggtagaaattgtggacggcggtacgcaagggctaaacctgttaggttatgttgagcaagccagccatctcctgctccttgacgcgatcgattacggcctggcgccgggcagcctgcgaacctatgccggcgagaaaatccccgcgtatctcagcgccaaaaaaatgagcctgcatcaaaacagtttttccgaagttctggcgctggccgacatccgcgggcatctgccctgtcacattgcgctggtcggcctgcaaccggcgctactggacgactacggcggtagcctgagcgaaatagctcgcagccagctaccggcggcagaacaggccgccctggcgcaactggccgcctgggggatcgtgccgcaggcaaatgaggtcgcacgctgcctgaactataaatgcctgtcgatggaaaattatgagggagtgcgcatacgtcagtatcagacacgtctggagggcaaaagaagtggcgaatgacaccccgttctctgcgctatggcaacgcctgttaacccgtggatggcaaccggtagaggcttctacggtagacgactggatcaaacgggttggagatggcgtcatcctgttaagtagcgatccgcggcgtacgccggaagtcagcgataacccggtgatgattgccgaactcctgcgtgagttcccgcagtttgactggcaggtggcggtggccgaccttgaacaaagcgaagctatcggcgatcgctttaatgtacgtcggtttccggcgacgttggtttttacagacggcaagctacgcggcgcgctcagcggcattcatccctgggctgaactgctcacgctgatgcgttcgatagttgacactcccgcagcgcaggagacagtacaatgagcaacgccttttttcatctgctggggccaggtacgcagcctgatgacgccagtttctcgatgaatcccttaccgctcacctgtcaggtcaatggcgacccaagtatggcggcgctggagcgctgcgctcacagcccggcggtgatggcattgttgaccgatctgcgaggtcagcttgcccggcgcatcccggaagtcggcgacgtgctgggatgggagttatctcccctgaatgccgatgatctctcattcctcaatacgctattgggcgaaggcgaagtctcggtacgcattcagcatccggacgggagtgaaagcgagatccaggagaccatcttctgcggcctgtggcgggtacgccatctgcataaccgacgtctgctgacggatcgtctggaagcgggtagcgcgcccctgacattatggcaagcggcgactgccgatacgctgtctgacgactctctgctgcctccgcctgtcgctggcctgatgaatggactgccgctggcccatgaattattggcgcacgtacgcgatccggcgttgcaaccacacagcatcaatttgacccaactgccgctcagcgaggccgatcgtctttttctggcgcgtttatgcggacacgggaacatccagattcgcatctccgggtatggcgaaagccaaatcaacgccacagcattgcgccatctctggcatgtgcgctgtctggacgcccttaaagggccgttgctcgatagctatgagatttgtcctttgccggagctggtactggcggccccggaagatctggccgattcgcgccagcgcctggatgaagtctgccgatggctggagacgcgctagcgctctcaacaggaacgtcaccggagtccggtactgattagctttttactctctttctgcctacaggagttagcatgtgggatgtcattgacttatcgcgctggcagtttgcgctgaccgcgctgtatcactttttatttgttcctcttacgcttgggctgatttttttgctggccgtcatggagacgatctatgtggtgacggggaaaaccgtctaccgcgatatgacgcgtttctggggcaagctcttcgggatcaattttgctctcggtgtggctaccggcctgaccatggagtttcagttcgggactaactggtcgctctattccaactatgtgggcgatatcttcggcgcgccgctggcgatggaagcgttactggccttttttctcgaatccacttttgtcggtctgttctttttcggctggcagcggctgaataaataccaacacctgctggtcacctggctggtggccttcggctccaatatttcagcattatggattctgaatgccaatggctggatgcagtatcctaccggcgctcatttcaacatcgatacgttacggatggaaatgagcagcttcagcgatctggtctttaacccggtgagccaggtgaaattcgtccataccgtcatgtccggttatgtcaccggcgccatgtttattatgtccatcagcgcctggtatctgctacgtggccgcgagcgtgaggtggccttgcgctcgtttgctatcggctcagtattcggcaccctggccattctgggaaccctgcaactgggggacagttcggcctacgaagtcgcccaaattcagccggtgaaactggcggcgatggaaggcgaatggcaaaccgaacccgcgcccgcgccgtttcatctgattgcctggccgcagcaggaacaggagcgtaatgcatttgccgtgaagatccctgctctgctgggtattctggccacccattcgctggatacaccggttccggggttaaaaaacctgatggacgacgctctgccgcgcctgaagcgtggccgggaggcctggttactcatgaaggagatagcgcaaggcaatcgctcgccgcaggtactgaatgcgtttcacgccgttgagggcgatctggggtacggcattctgctggcgaaatatgccccggatatgaaccatgtgacgccggagcagtatcgtgcggcccagcgtggcgctattcctcaggtggcgccggtgttctggagtttccgtattatggtcggctgcggttcgctgctgttagtggtgatgttgattgcgttgatacagacgctgcgaatgcgtatcgaccagcatcgctgggtattgcgtatgacgctgtggagcctgccgttaccgtggattgccattgaagccggttggtttatgacggagtttggccgtcagccctgggcgattcaggacattctgccgacctggtacgctcactccgcgctgacgccgggccagctggccttctcaatgggacttatcctcggactttacaccctgtttttaatcgcggaagtctatctgatgcagaagtacgcgcgtcttgggccgagcgccatgcaacatcaacaacaagcgcaacaacagggataaaggagacaatcatgttggattatgaaacgttgcggttcatttggtggctgctgatcggcgtcatcctggtggcatttatggtaactgacgggtttgatatgggtgtcggttgcctgctcccgctgatagcgcgcaacgatgacgaacgccgggtattgatcaatagcgtgggcgcccactgggaaggaaaccaggtatggttgattctcgcgggcggggcattattcgccgcctggccacgggtctatgccgccgcgttttccggtttttatgtggcgatgatcctggtgctgtgtgccctcttctttcgcccgctggcctttgattatcggggaaaaatcgccaatgcccgctggcgcgcgctgtgggataccggtctggttatcggcagcctggttcccccagtcgtattcggcatcgcgttcggcaacctgtttttaggcgtgccgtttgccttcacgccgcagcttcatgttgactattttggcaccttctggcagttactctcgccctttgccctactgtgtggattattgagtctgtcgttggtgattatgcaaggaggcgtctggttacagttgaaaacggagggcgttattcgtcaacgggctctgtcggccacccgctacagcgcgctgctgatcgtgatctgcttcctgctggccggttactggctgtgggccggcgttgatggctttgtcttgctcacgcaggatgccaacggcccttccaatccgctcttaaaaggcgtggcgatactccctggcgcatggatgaaccactttatacgctcgccgctactgctcatcatcccgttgctcggtatgatcctgccgattctggctttctatgcctgccttcgcggtcagactattcgtggatttctgttcgcttccctgacccaggcctgcgtcatctttaccgccggcataacgctatttccttttgtgatgccgtcgagtgttagtcctctctccagcctgacggtgtgggacagcacctccagccagatgacgctcgaaatcatgctggtgattgtgctgatttttctgccgatcgtactgctctatacgctatggagctattacaaaatgttggggcgtatcaacctggggaccctccgccgcaacgatcatgaactttattagggagcgggagcgatgtggtatttactgtggtttgtcggcattctgctgatgtgctcactgtcgacactggcgctggtatggcttgagtcgcgtcaacaataaagaggtaaaccggggtcagcgccgtctgactccggttatttttatctttttacgcgcctggtgaagacgtttccccgccgacaggacgacataacattgatacatgtcgttatcataacgtttacttttagaggtgcgtcataattatgacaaatagccaccttgcacatatttcgcatatttaagcaattaattgcataattagcaatatatcacctcttatagcggatagttaaccacttcccatccaaaatcataacgaaaatccaactgcctgccatttttgatctgagttaattgtttaaaaaagtgttaaatttatcgctacatggtgtgatctactatgtaccacggtcaattaaagaacatattacttttatcactaaggtttatcatggataagttatcttacgcttcagatagcagcacatctgcctggaatacctacctgcaacaaatcgagcgtgtggccccttatctgggcgagttatccccctgggtggatactctgcgccacccaaaacgcgctctgatcgtcgatattccggtacaaatggatgatggcactattcgtcatttcgaaggatatcgcgtgcagcacaacctctcccgaggtccgggtaaaggcggtgttcgctaccatcctgacgttgatctcaatgaagtgatggccctgtcagcatggatgaccatcaaatgtgccgcgctgaacctgccatacggcggcgctaaaggcggtatccgcgtcgatccgttctcgctgtcggaaggtgaactggagcgtttgacccgccgctataccagcgagatcggcattatcatcgggccgcagaaagatattcctgcgccggatgtcggcaccaacggtaaagtgatggcctggatgatggatacgtattccatgaatcatggcacgacggtcactggcgtcgtcaccggtaagcctatccatcttggcggttcgctgggccgtgaaaaagcgacggggcgcggcgttttcgtcagcgggctggaagccgcacgtcgggcgaatattgctgttgaaggcgctcgcgttgcggttcagggttttggtaacgtcggcagcgaagccgcgcgtctgtttgcaggcgctggcgcccgtgtcgtggcgattcaggatcataccgcgaccctgtttaacgccaccggtattgacatgaaggcgctcacggcatggcagacagaacacaaacagatagccggtttcccgggcgcggaaactatcgccagcgatgcgttctggcgtctggagatggatattctgatcccggcggcgcttgaaggtcagataactcgtcagcgcgcggaagccctgacgtgtaagctggtgctggaaggggctaacggcccaacctatccggatgctgatgatgttctggccagccgtggtatccttgtggtgcctgacgtggtctgtaacgcaggcggcgtaaccgtcagctacttcgaatgggtacaagatatggccagcttcttctggagcgaagaagagatcaatgcgcgcatggacaaaatcatgaccgacgcgattgtccatgtctgggagaaagcggctgagaaatcctgctctctgcgcaccgcagcctatattgtcgcctgtgagcgcattctgctggcccgtaaagatcgcggtatctatccaggttaaggcgacaaatcattgcgctaaaatccacgtcccggcgtggattttttgtctgtataccccgttttccacgcgcgcgccgataaattctgtctcaataaaatgtctgtttgttcgcaaaatagcggttcaatcacgcgtatctggtcatcgtagactaaggttttgtcatggtaaatgccgttggctttggctcaccgctaaggagataacttgatgatacccccagagattcgccgttctgttctactgcagaaagccataaaactggcgctggcagggacgctgctgacgtttgcatcgttttcggcgactgccgcagacccgtcttccgacactgaaactccgcagccgccggatattttgcttggcccgctctttaatgatgtccagaatgcaaaactcttccccgatcagaaaacctttgctgacgccatacctaatagcgatccgctcatgattcttgcggattatcgtatgcagcggaaccagtccggcttcgatttacgtcattttgttgatgttaacttcaccctgccgaaagcgggtgaaaaatatgtcccgcctgccgggcagtcattgcgtgaacatattgatggcctgtggccggtgctgacacgttcaactaaaaacgtcgaaaagtgggactcgctcttgccgttgcctgaatcctatgtcgtgccgggtggtcgattcagagagatttactactgggacagctactttacgatgctggggctggcggaaagcgggcactgggataaggtggcggatatggtggcgaactttggttacgaaattgacgcctgggggcatattcctaacggcaaccgtacctactacctgagtcgttcgcagccgcctttctttgcgtttatggttgagttactggcgcaacatgaaggtgacgatgcgctgaaagaatacctgccgcaactgcaaaaagagtacgcctactggatggagggcgttgagacattgcagccagggcaacaaaaccaacgcgtcgtcaaactggaagacggcagcgttctcaaccgctactgggacgatcgggatacgccccgccctgaatcctgggttgaagatatcgctaccgccaaaagcaaccccaaccgcccggcaacggagatctatcgagacctccgttctgctgccgcctccggctgggatttcagctcccgctggatggataatccgcagcagctcagtaccattcgtaccaccactattgcccctgtcgatcttaacgctctgctgtatcaactggagaaaaccctcgcccgcgccagcgctgcggcgggcgatcgggccaaagcctcgcactatgacgcgctggccaacgcgcggcaaaaagccattgaaatgcatctgtggaataacaaagagggttggtatgccgactacgatctgaagaacaataaaatccgtgaccaactcaccgctgccgcgctgttcccgctctatgtaaacgccgccgcgaaagatcgcgccgcgaaagtggcggcggcggcccaggcgcatctgctacagcctggcgggctggctaccacctcggttaaaagcggacagcaatgggatgcgccaaacggctgggcgccgttacaatgggtcgctgccgaaggattgcaaaattatgggcaggatgacgtggcaatggaagtcacctggcgctttttaaccaatgtgcagcacacctacgatcgcgagaaaaaactggtcgaaaaaaatgatgtcagcagcaccggaaccggcggtggcggcggcgaatatccacttcaggacggctttggctggaccaacggcgtgacgctgaaaatgctcgatctgatttgtccgcaggaaaaaccgtgcgatagcgtaccgtctactcgtccggcatcgttaagcgcaacgccgacaaaaacgccgtctgcagcgacgcagtaacgcgtgtttatagtaggttgacccggtgctgaccgggtcaacgcttacacgttctgcagcggttagccgcgtcgcagaaggcggaaaatcaccagcaccacgatcgcgcccaccacggcgaccaggaaactgtgcagattaaagccgctgatactgccgccaataccaaacatcgtcgccagccatccgccaacgaccgccccgacgataccgagaatacaggtcaggataaatcccccgccatcgcgccccggcataagcaatttggcgataacgccggcaatcaaaccaaaaacaatccaggcgataattcccatttgcgaaccctctttccagtaaaaacgttttaagtataggcaaagtcgagcgtcgcatttctgaacactgatttatctcgcggacataaaaatttatttatcgctattaagttctttctaccgatgccgataacccaacgatagtctgcgtatcaggggttatttcgtgtgagtggttacaatgagcagttcctgaaaaaaaatccattagcgatattaggcgtgctacgggatttaaataaaaatcaggttccactgcgtatttcatgggcgcatggtcaattcatcagtaaaattttggcggtagacccggaaaaactcatcgtggattacggcagccaggaatacgaaaatagcgccgtattacgtgccgggcaggtagccattatcgcagaaacgcagggcgcaaaagtcgagttcacgttgccgcaactcgttacaggcgaatatcagcggctgccggcctttatcacgcccctgccgtcgtcactgtggtttgtccagcgccgggagtattttcgcattggcgcgccgctgtatccgccttattacggcgtcaccacgctaccggacacccgtacgttacgttttcgcctgtttgatctttccctgggcggcatgggcgcgctactggaatccgccatccccgacggactaatcgaaggcgcacgcttttcgcaggttgaactgaacatggggcaatgggggatttttcacgttgacgcccagcttatctccatcagcgagcgtaaggtgattgatgggaaaaatgaaacgatcaccactccccgcctgagctttcgtttccttaacgttagcccggcggtggagcgggagttgcagcggattattttttcgcttgagcgcgaggcccgagaaagagcgaataaagtgcgagaataatcttcacgctaaactacatggcgtccagcgcctgctgaagcttccagatatagcgcggcgcctgcggcgcgggatgattatcaacaacatgttcaaaaaactcgtccgcatccagatcgttaattttttctatcgccttcttcctgtcggatgaaaaagtacgcaataacgcgcctgcgccgttagcataagagacgaccagcgcatattgcatcacctgcggatctttgatgccggccagcggcccattttccagaatgctcagatacgccgcgcccattgagatgttacgctcagggtttttcagctcgctggtggtcggttcgccacgccagcccatacgacggtaaacgtcgcgcccggaggtcgacgcctttaactgcatcaggccaatcgcattagatttactgaccgcgttagggttgccgccggattcaatggcgataatcgcggtgattaaatgcggatcaaccccccatgccgccccggctttttcactgatgggcatccactgcatcgcacgctttacaggcacttcggcattccacggcggattcctgtaatcctgttttgagctacagccagccagtattactaccaaaaaagcaaaccatcttaatttcacgtcatctatccttatagccgtaacttatctgccgaagaggtcataccgccccggccaggcacttaggttgcctccctggtgcgcatccagaaacgtcgcacaacgagggacatcgcctaatatatgcggcatgatatacatttgcattctattgtcagcaaggaattaccatgtctctgtttcatttaatcgccccgtcgggctactgtattaaccaacaggccgcgttacgcggcgttcagcgcctgactgacgcgggtcatcaggtggagaatgacgaggtgattcgtcgccgctttcagcgttttgccggtacggacgcggaacggctggccgatgttaattcgctggcctcgctaacgtcgccggatacaatcgtcatgccggttcgcggcggctatggcgccagccgcttgttggatcgtatcgactggcaggcgctcgcctcccggcaacagcgcgatcccttactgatttgcggtcatagcgattttacggcgattcaggctggactcctggcgcaggccaatgtcatcacctttagcggtcctatgctggcggcaaattttggcgccgaaacgctgaatacgttcaccgagcaacatttctggctggcgctacgcaaggcgcaatttaccgtagagtggcaaggcgacggccctcagtgcgacgcacagggcaccttatggggcggaaatctggcgatgttgatttcccttatcggtacgccctggatgccgactatcgataaaggaattttagtgctggaagatgtcaatgagcatcctttccgggtggagcgtatgcttttgcaactggagtacgccggaattttaaaccgccagagcgccatcgttctcggcagctttagcggcgcggcgcccaacgagtatgacgccggttattctctggagagcgtctacgcgtttttacgttcccgtctgtccgttccgctgattaccggtctcgacttcgggcatgaacaacgtacggtaacgctccctatcggggcaaacgcgatgcttaaaaatacgcgccaggggactcaactcactttatctggccatcctacgctgcaattgtaaaaaaagtccccgacaggctaagtaaaacgctgccctggccgttattatgttaatgttaaataatacgaagtcgtgtgagtcaggagatataaaacgttggatgctgcaacaattattagtctatttattttaggttccatccttgtaaccagcagtatcctgttaagttcattctcatcgcgactgggtatcccgattctggtcattttcctcgccatcgggatgttagcgggtgtggatggcattggcggtattcctttcgataattatcctttcgcttatatggtcagtaacctggcgctggcgattattttactcgatggcggaatgcgcacccaggccagctctttccgggtagcgctgggccccgcgctgtcgctggcgacgctcggcgtactgatcacgtcggggttaacaggtatgatggccgcctggctgtttcatctggatcttatcgaaggtctgcttatcggcgcgatagtcggttccactgacgccgcagcggtcttttctctgcttggcggcaaagggctaaacgaacgtgtaggctccacgctggagatcgaatcgggaagtaacgacccgatggccgtttttctgaccattacattaattgagatgatccagaagcatgaaaccggcctggactggatgtttgccgtccatattatccaacagttcggtctcggtattgtttttggcctgggcggcggttacctgctacagcagatgatcaaccgtatttctctgcccagcggcctgtatccgatgctggcgctcagcggcggtattctgatttttgctttgacgaccgcgcttgaaggcagcggcattctcgcggtctatctgtgcggattcctgttaggaaaccgcccgattcgcaaccgttacggcatcctgcaaaactttgacggactagcctggctggcgcagatcgcgatgttcctggttctggggctgctggtgacgccttccgatctgtggccgattgccgtccctgcgcttattctctccatctggatgattttcttcgcccgcccactgtcggtgtttaccggcctgctgccatttcgcggcttcaatcttcgggagcgcattttcatcagttgggtcggactgcgcggtgcggtgccgattattctcgccgttttcccgatgatggccgggcttgaaaacgctcgcctgttctttaatgtcgctttctttgtggtactggtgtcgctgctcctgcagggaacatcgctgtcatgggcggcgaagagagccaaagtggtcgtgcctccggttggctggccagtatcgcgcgtggggcttgacatccatcctgataatccgtgggagcaattcatttatcagttgagcgccgacaaatggtgcgtcggcgcggcgttgcgcgacctgcatatgccgaacgaaacccgcattgccgcgctatttcgcaataatgaactgtttcaccccacgggtagcactcgcctgcaggaaggcgacgtactctgcgtgattggccgggagcgcgatctgccagcgctgggcaaattgtttagccagtcgccgccggtttcgttagatcagcgtttctttggcgattttatcctcgaagcgaatgcgaaattcgccgacgtggcgcttatctacggtctggaagaaggaacggaataccgggataaacaacaaactctgggtgaaatcatacagcagctgctgggcgctgcgccggtcgtcggcgatcaggtggagtttggcggcatgatttggacggtagctgaaaaagaagataacgtggtacgcaagattggggtacgcgtcgccgaagacgaagcagaataaggtcgcctggcaacgtcgacccgcccccaagtggaccggtcgacgccttagcctgaattaggttacgttgtcacaaacggcacacgcggcgctacggcgcacagtagctcatagcccagcgtgcctgccgcagaagcgacatcatcgaccttaatttctttgccccataattcaaccggcgtgccgattcccgcctgcggacacggcgtcaaatccaccgccagcatatccattgaaacggtgcctactgttctggtacggataccgtccaccagcacaggcgtcccggtcggcgcatggcgtggatagccatcggcataacccgccgcgacgatgccaatgcgttgttcctgagtcacagaataccctccgccatagcctaccctttcacccgcgctcagcgtctgcacgccaataatttcgctactcagcgtcatcacaggttttagtccggtatcggcaatatcccgccactgtcctgacggcgacgcgccgtacaaaataatgcccggcctgacccagtcataatgcgcctggggatgccacagcgtcgctgccgaatttgataacgagtatgcacactgaagaccttccgtcgccagcgcaatacgcctcatcgcctccccgataccttccggatgatcggcctgagcaaaatgtgacatcagggtcatttcaccgacattgcgcattgcccgcaattgctgccagacggtctgcgcccgctcaggctgaaaaccgagtcggttcatgccgctgttgactttgacatagatatccagcggcgcgttaagccgcgcattttgcagcgctttcaactgccagttactgtggatgcaggtggtcagccgataagtgtcatacgcctccaggtcttgcgcatggaaaaacccctccagcatcaatatcggccctttccacccgcgctcacgcagggtaatcgcctcttcaaggttgagcatagcgaaaccatctgtggcgcccagcgcgctccagacgcgttcaataccgtggccgtaggcgttggctttcactaccgaccagacgcgcgcctctggggccgcccggcgcacaatagccaaattttgtttcattacctgtaaatcaaggctggcctgtatagggcgggtcatttcacttcctttatcagttatgcgcgctatgcaaacgttgcgggggggtgggcgtaaaatcggaacggtatcgcgccacgctcagatcgtcgtagggtatcgctggcgtgcgacccgacaagatatcgcttaacaactggcctgaaccgcaggccatcgtccagcctaaggtgccgtgtccagtattaagccacagatttttataacgggtgcgtcctactaccggcgtgccgtccggcgtcatggggcgcaggccggtccagaatgtggcctgctcaatatgaccgccgcgcggaaagagatcgcgcacaaccatctccagcgtctcgcggcgcggttgcagtaagtcggtattaaagcccacgatttccgccattccccccacgcgaatacgcttatcaaaacgcgtaatagcgattttgtaggtttcatcaagaatcgtcgatactggcgcgccgtctggctcgacgattgggatggttaatgaatagcctttcagcggatacaccgggatatcaacaatgcctttaagcatcgccgtcgaatacgatccaaacgccataacatacgcatctgctttaatgatctcatcggcgcatttcacgccgtaaatctgatcattttcgtacagtaatttttccacgggagtattaaagcgaaaggttacgcccgcctgctccgccatgcgcgccagacgctgggtaaagagctgacagtccccggtttcatcattcggtaagcgcagtccgccggttaatttatgcgcaacctcagccagagcgggttcaacttccgccagtcggctggattccaggagctgatacggcaccccggcatcttccagcacggcgatatcacgggtggcgttctcatactgttgcgcggtgcggaagagttgtagcgttcccccctggcggccttcatattcgataccggtcgcggcgcgtagcgttttcagacagtcgcgactatattccgccaggcgcaccatgcggcctttattttccatataatgccgggtatcgcagttacgcagcatttgccacatccacttcagttgaaatggagtgccatccagacgcaccgccagcggcgcatggcgctggaacatccattttatcgccttcagcggtacgccaggggccgcccagggcgccgcatatcccggtgaaatttgtccggcattcgccgcgctggtttcttgcgccgggccggattcgcgatcgatgacggtgacatcatgccccgcctgactcaagtaccaggcgctggtcacgccaactacgccactccccaggatgacaactcgcatagccactccgttaatagtaaaagaacaatcttctgattacatcttgataacccagatgaaaatattattcaacatatgacttttttatggtgacgtgcttcacatataccctaaagacaagcgatcccactggtttgggatctcctgctacgcggcatggctatacagcataaaatgatgccaatacccgattttttgccgttcaatgtggaggaaaccgcaaagaaaagttttcacgatcaagtcgttttttaacatggtgttctatgcttgaaaggaggcgctccatacagagagcgtcgccaacaatgagggtgcgcgaatggcaatgattgattccatgaacaaggacaccacacgtttgagcgatggacccgactggacatttgagctgctggatgtctatctggcagagatagaccgcgtggcgaagctctaccaactggatacttacccgcaccaaattgaagtcatcacttccgaacagatgatggacgcctactccagcgtcgggatgccgatcaactatccgcactggtcgtttggcaaaaagttcattgagacggaacgtctgtataagcatggtcaacaaggactggcttatgaaattgtgatcaactctaatccctgcattgcctacctgatggaagagaacaccatcaccatgcaagcgctggtcatggcgcacgcctgttacggccacaactccttttttaaaaataattatctcttccggagctggacggatgccagctctatcgtcgattacctgattttcgcccgaaattacattacccgctgtgaagaacgctacggagtggatgaagtagaaaaactgctcgactcctgccacgcgctgatgaattacggcgtcgatcgctataagcgcccgcagaaaatctcgttgcaggaagagaaagcgcgacaaaaaagccgggaagagtatctacaaagccaggtgaatatgctgtggcgcacgctgccaaaacgcgaagaagaaaaaacggtcgccgaagcacgccgctttcccgctgaaccgcaggaaaacctgctctattttatggagaaaaacgccccgttgctcgagccgtggcagcgcgaaattctgcgcatcgtgcgtaaagtcagccagtatttttatccgcagaaacagacgcaggtcatgaacgagggctgggcgaccttctggcactacaccatcctgaaccatctgtatgatgaaggcaaagtgacggaacgctttatgctggagtttttacacagccataccaatgtcgtatttcagccgccctataatagcccctggtatagcggaattaacccctatgcgctcggctttgccatgttccaggatatcaaacgtatttgtcagtcccccacggatgaagataaatactggtttccggatattgccggttccgactggctggaaacgctgcacttcgccatgcgcgattttaaagatgaaagctttatcagccagttcctgtcgccaaaagtgatgcgtgatttccgtttcttcacggtacttgatgatgacaggcataattatctggagatctccgccattcataacgaagaaggttatcgggagattcgatcaaaactgtcgtcacagtataacctgagcaatctggagccgaatattcaggtctggaatgtggatttacgcggcgacagatcgctgacgttgcgttatatcccgcataaccgcgcaccgctggataaaggccgcaaagaggtgctgaaacatgtgcatcggttatggggctttgatgtgatgctggagcaacaaaatgaggatggcagcgtagaactgctggagcgttgtccgccgcgcatgaacatgctgtaatcgagatgctgcccggtagtgtttgcgcttaccgggcatcgcgggattatcgtccctgaatcgctaaatcgccgggcagatttttctgcatccgatgccaaatctcgccgctgtcatgcccgtaacgtcgcaccgtttcatacacctggtcgtgcgcgccctgctcgcataacgacgataatttatgatagaaacccagtgccagactgcgcgcttccggattggcgaaatagtggcgaccaatgcgggtgtataaccctttcatgccgttcaggatcaagccgtaaataggattgccggaggcgaatgccagaccacgaaagatgttatagtccagatcggcgaatgcatcggcatggtcggccacttcgtgggcagtggccagtacttcctgcgccttatccgggtgttgacgcaacgcggtacgaataaagatagtagaaatattggtacgcaccgacaacaaattgtcgatcagttgcggaacgctttcatgatcaaggcgggccagcgtttcaaggatattcagccctgacgtttcccaaaaattattaacctttgtcggtttgccatgctgaatggtcagccagccatctcgcgccagccgctgtaacacctcgcgtaatgtcgtgcgcgtcacgccgatcagttcggagagttctcgttctgccggtaagatcgtgccaggaggaaagcggttattccagatactttcaataatatactcttccgcgaaacccgccgggctctgcgccttaatgaccatagtgagatttccattacacagcaaaacatagttgcactcatcataccagacgggcgtaacacctgatagcggacgcaatgaagaaaaaggggatcaaggcaccatttctgatatcgcctgccaatatcgttaaggacttgcttgcattcgtcgcgctcgctactctctgtgtttaaacataaaaacgctatttcatttttctaggtaaggaaaaatttcatggagatctcatggggtcgcgccatgtggcgcaactttttaggccagtcgcccgactggtacaaactggcactacttgtctttttaattgttaacccattcattttcttagctaatccctttattgccggttggctgctggtggcagagtttatcttcactctggcgatggcgttaaagtgttaccccctgctgcccggcgggttactggccattgaagccgttatcatcggtatgaccagcgccgcccatgtacgtgaagaggttgccgccaacctggaagtcttgctgctgctgatgtttatggtggcaggcatctactttatgaagcagttattgctgtttatttttacccgtctgttactcagtatccgctcgaagatggttctgtcgctggccttttgcgtcgccgccgcattcttgtcggctttccttgacgcgcttaccgtcgttgcggtggtgatcagcgtcgccgtcggtttttacgggatttaccatcgtgtggcctcatcgcgcggcgaagagaacgatatgctggacgacagccatatcgatccgcattacaaaacggtgctggagcaattccgcggattcttgcgtagcctgatgatgcatgcaggcgtggggacggcgctgggcggcgtcatgaccatggtcggggagccgcaaaacctgatcatcgctaaagcggctggctggcatttcggcgacttctttttgcggatgtcgcctgtcaccgtcccggtactggtatgtggactgttaacctgtatgctggtcgagaaaatgcgctggtttggctatggcgaaacgttgcccgaaaaagtccgcgacgttttacagcaattcgacgatcaaagccgtaagaagcgcacccgccaggataaaattaaactcatagtccaggcgattattggcgtctggctggttaccgccctcgccctccatctcgcggaggtgggactgattggtctgtcggtcattattctggccaccgcgttaacgggtgtaaccgatgaacacgccatcggcaaagcgtttaccgagtcgctgccgtttactgcgctgttaaccgttttcttctccattgtggcggttattatcgatcaacatcttttcgcgccgattattcagttcgtcttgcaagcctctgaacacgcgcagctaacgctgttctatctctttaacggcctgttgtcttccatctcagataacgtctttgtcggcaccatttatatcaacgaagcgaaggcggcaatggaaaacggcgctatcagcttaaaacagtttgagcttttagccgtggccatcaataccggtactaacctgccatcggtagcgacgccaaatggtcaggcggcattcttattcctgctgacctccgcgctggcgccgttaatccgtctctcctatggccgtatggtctggatggcgttaccgtacactatcgtactgaccctgatagggctactgtgcgtcgaattcactcttgcgccggccaccgaatggatgactcaggcaggatggttagcaacgctttcgtaacgtttggccgggcaatacaccgcccggctccgatttttgcctgataattatccaattacacattatttcatttcccgctagtggcgcacgaattgaattggtttacactgcggtctctacgcatgttgcagggaaattattatgttgcgatttttaaaccagtgctcacggggtcggggcgcatggttactgatggcgtttaccgccctggcgctggaaatggtggcgctgtggttccagcacgtcatgttacttaaaccttgcgtgctatgtatttatgaacgttgcgccctgtttggcgtgatgggcgcgggtctggtcggcgcaatagcgccgaaaacgccgctgcgatacgtggcaatggttatctggatttacagcgcctggcggggtctacaactggcgtatgaacatacgatgattcagttgcatccctcgccgttcatgacctgtgactttatggcgcgctttccagactggttgccgttgggtaaatggctgccacaggtgtttgtggcatccggtgattgcgccgaacgccagtggtcgtttttaacgctggagatgccgcaatggctgttggggatctttgccgcttaccttgtggtggcgatagccgtcgtcatagcccaggcatttaagcctaaaaaacgcgacctgttcggtcgttgatacacacgctccttcgggagcgttttttttgcccgaagcgttgtttgccagtgattaaaaggtgtatattaaatacatcttttaatcaccacatcagggagatgtcttatgtcccacttacgcatcccggcaaactggaaagttaaacgctctaccccctttttcaccaaagagaatgttccggcggcactgctctctcatcacaacacagcggcaggcgttttcggacaactctgcgtgatggaaggcaccgtgacctactatggctttgcgaatgaaaccgcgacagaacccgaagtgaaagtggtgattaatgccgggcaattcgccaccagtccgccgcaatactggcatcgggtagagctgagcgatgatgcgcggttcaacattcatttttgggtagaggaagaccatcagggcgaggaaatgtatcaacagaaaaaagcctgacatcggtaaaccagtcaccactgggcggcgtcccgcccagtagccaggtgattaatggcgctaattaaacgctagagtagtttaattttaacgtggtatccctcaagccctttcatcgtttctcgcggcgcgaactctatttcggaaacctcttgcccggttttcttccgtagttcggcaacctttttgctaatgagtgccgcgatttcctcttctgctttatgtgtcaactcttcgctgttcattgatttcctcctttgaactcgcaaacggctaagcgcaataagacagtgtcgtcatggacgcgctactattttaacgtacaaaaaattataggctatctttctgaggattatcaggatgtttcgctttagaagatgtaaaaaaccgcctggcacagacggtgcatcaggcggttggttaatagcacaagacgctatctacgaggatcttcaacctcattctgggtatccgggtcgagaggatcgtctccctctggtgtatccggaatattttcaccaggaagcggctcatcctctggtaatggatcgactaaatcaggacgttcagacataaagcctccaacgaaccatagttattaaagataccctacagcactacttttggtttttctttggattttttccttcgtcttcgggtgtcttatcaggcttcctgggctgatcctttgaaacgcgcaacggttggttattcatggggtaactcctcaggataggcagcgatatactgctttgaaagtatagagtcgccgccatacgtgcgcgagcgcagcgacaaggcgcgtcagggaagaagagaaggcagtgataacgccaggtgacggaatttgcacgcaattcctggcttcaggggccgcccagcgtaaattaaagaattgtaaacaatcagccgttttgccgaagacttattctgcccacgacggtttatttaaaatatgatcctgccagtcccgtacttcagattctttaaccgcgatatgacggacagaaattcgctcgccatgcatagcagctttcgatccagtcagcagcggatgccacgtcggcaagggcttaccttccgccaacaaacggtaggcgcaggtcatcggcaaccattcaaagtctggcaagttttcgcgagtgagtttgatacagtcgggttcaaattcaaaacggcgctcataatgacggcactggcacgttttgatatttaattgcctgcacgccacgttggtgaagtagatttcatctgtatcttcatccatcagcttatgcaggcagcattgaccgcagccatcgcacagcgactcccactcggcatcggtcatttcatccagggttttacgttgccagaaaggtgtatcgctcattaaagtatccgccattgcactaaagctgcaccttataaccagtctggcctgcagatgcaagttttaccgccgctgaaggcggcaagcagattttacagaacgcgggtagacaacgtttcgccattaaaacgaatgtccagctcatcgccgcttaataatggccccacgcctgccggcgtgccggttagcaccacgtccccggctttgagcgtaaaatagcggctcatataggcgataaggggcacaataggatgaatcatatccgcggtcgacccttgctggcgaacctcgccattaacgttaagtccgataaccgtattttgcggatcgccgcagaaggccgcgacagggatgaagcctgaaatcggacatgcgttatcaaaacctttggctttttcccagggctgtccggcctttttcattttcccttgaatatcgcgcagggttaaatcaagcgccacgccataaccggctatcgctttacgtacatgatcttcggtcgcctggcggagcgttgcgccaatcagcacagcaagctcaacttcatgatgaacagcccccatatccgccggaatcgccagcggctggcgaatatcacacaatgcggtttccggcttgataaaaagcacgggttcttccggcgtcgcgctgcccatctccttgatgtgatttgcgtaattactgcccacgcagaccactttacttaccgggtaatcaagcaaggcgccttgccagttacgatgttgatacatattttcccctaagatcatgatggaattcaggcgcggcgccgaataccgtttaacggtcagcgggcgacgtattttgtcctaccgaagaaagatgttgtttcagcaaatcttccggcggcggcggcaattgtaaataatagccctgctcgcttaacgcctgttttactttttcgagctcggcattgactaattttttacgtccatcaagcggcagcatcatcgctaactgcggctgaccgaatcctttcatcaacgcttcaggcacccgcgaaaaatcgtcttttttttcgacatacaaataggtttgatcgcgcttgctacttctatagatcacacaaaacatacttttactctgaattaacgggatggtgacttgcctcaatataatactgactataacatgccttctggacttcggaatatcactccgtatcggagatgataaatagcaaattgagtaaggccaggatgtcaaacacgccaatcgagcttaaaggcagtagcttcaccttatcagtggttcatttgcatgaagcggaaccagaggttattcgtcaggcgttagaagacaaaatagcgcaggctcctgcgtttttaaaacacgcccctgtcgttattaacgttagcggtcttgaaagcccggtaaactggccggaactgcataagatcgtgacctcaaccggcttacgcattatcggcgtgagcggctgtaaagacgccagcctgaaagtagaaatcgatcggatgggtcttcctttactgactgaaggtaaagagaaagcggttcggcctgcgcccgttgagccggcaacgcccagcgaaccgccgcaaaacgctaatcccatcacaaaaacgcgattaattgatgttccggttcgttccggtcagcgcatttatgctccacaatgtgatctgattgttacaagtcacgtcagcgctggcgcagagcttatcgctgacggcaatatccatgtctatggcatgatgagaggtcgcgcgctggcaggagcgagcggcgatcgggaagcgcaaattttttgtacccatctgacggcagaactggtctctatcgcaggtgtttactggctgagtgataaaatcccggcagaattttatggcaaagcggcgcgcctgcgtttagcagacaacgctttgacagttcaaccgttgaattgatccctttttaacaaggaatttttatggcacgcattattgttgttacttcgggtaaagggggcgttggcaagaccacctccagcgcggccatcgctacaggtttggcccagaagggaaagaaaactgtcgtcattgattttgatatcggactgcgtaacctcgatctgattatggggtgcgaacgtcgtgtcgtttacgattttgtaaacgtcattcagggcgatgcgacactgaatcaggcgctgatcaaagataagcgtactgaaaatctcttcattcttccggcgtcgcagacccgggataaagacgcgctaacgcgcgaaggcgtcgctaaggtactggactcactgaaagcgatggactttgagttcatcgtttgcgactcgccggcgggtatcgaaaccggggcgctgatggcgctctattttgccgatgaagcgatcatcacgaccaacccggaagtctcttctgtccgtgactcggaccgtattctgggtattctggcatcgaaatctcgtcgcgcagaaaatggcgaagaaccgattaaagaacatctcctgttgacgcgctacaatccaggccgcgtcaataaaggcgacatgctcagcatggaagatgtactggagattctgcgtattaaactcgtcggtgtgatcccggaagatcaatccgtactgcgcgcatcgaaccagggcgaaccggtgattcttgacgccactgcggatgcgggtaaagcctatgcagataccgtagatcgtctgttgggagaagaacgtcctttccgcttcattgaagaagagaagaaaggtttcctcaaacgcctgttcggaggataaattatggcattactggatttttttctctcgcggaaaaagagtaccgctaatattgcaaaagagcggttgcaaatcattgtcgcggaacgtcgccgtagcgatgccgaaccgcattatttaccgcagttacgtaaagatattcttgaggtcatttgtaaatacgtacaaatcgatccggaaatggttaccgtccagcttgagcaaaaagatggtgatatctccatccttgaacttaacgtaacgctgccggaagccgaagagtcaaaataagctcttttatgggaaaattcctggattaaaaaaggcagaagaatctgccttttttatttttttacattattccgaatacggacatttatttcactggccgttttcccggcaattaccgtcgttaaagcggatactcctgcaacagaagagttaacttctcctccatcagttcggcgcgccagccggaaatcaattccggttgcccattttgcggttttaatttccagtgccagttaagcaactgattaatctgccgacgcgatgccagtagctcgccgctgacgtgatgcgacgcgctcacctccgccaccagcgctttgatggctttaaacgctttgcgatagcccggcatgtccatcagattcaacaggggttccggcaatgcctcttccggtagcgcctgtgctttcgccaccagcgatatcaacgtcttgccatgaaaacgaatctcgctgccggaaagccccaggctatccagctcaccgagactgcccggcatataacgcgcgaccgcccacagattttcttcacgcacaacaaagttcaccgccatatcgcgctcacgcgccttacgtagccgccagtcagctaaaagttgcagacaggctaactggcgagtacgcagttgccaggcattggtgatatcccgccatgcttcttccggcgcctgaatctcctgacggcgctgctgcatcaaccgacactcatcaagcgcggcaggcagccatcctgcggcttcagtttcaatcatcagctttttggcgatcggtaacagataccagacatccgccgccgcgtattcacactgacgttcgcttaaaggccgggctaaccagtcggtacgagactcgcttttgtccagcgccacgcccgtatactcttctaccatcgacgcaaaaccccacgacagcggacgcccgcaaaacgccgccagaatttgcgtatcaatcaggggttccggcagttcgccaaacgcattcagaaatacttccagatcttcgctacccgcgtgcagaaatttggtgattcccgtatcgcgcaacaccgcttttaacggcgaccagtcgctgatgccgagcggatcgatcagggcgacatttgccccgtcaaataactggatcaatcctaactgcgggtaataggtgcgggtacggacaaattccgtatctaaagcaatagccggacatgcgcggacagcctcacacaggctcgccagcgcatcgtccgtttcaatcatttggtaattcaaatcgtgttctctttggttcgcgccaaaaaaaacgccggcttaaccggcgtctctcgttagctgacttaacgctcaggctttattgtctactttgccacgggcttcgtcacgcagttctcgtcgtaaaattttcccaacgttagattttggtaattcctcgcgaaactcgacctgtttgggcaccttatatccggtcagatggcgacggcagaaggtgatcaacgcatcgtcagtcaatgccggatctttcttaaccacaaaaagcttcaccgcttcgccgctactaccggaaggcacgccaaccgccgcgacttcctgcacgccagaatgctgcatcaccacatcttcaatttcgtttggataaacgttgaaaccagaaaccagaatcatatctttcttacgatcgacaatccgcagaaagccgtcttcatccataaccgcaatatcgcccgtatgcagccagccatctttaatgatttcatccgtcgcgtcaggacgctgccagtatcccagcataacctgcgggcctttcacgcaaagctctccggcctcacccggcgcgacttcgttgtcatcgtcatccaccagtttggcttctgttgacggtactggcaggccgatactgccgctgtgataatcaatatcatgcgggttgacgctcaccagcggggcgcactcggtcagcccgtagccttccagcaggtattgcccggtcagctttacccaacgttccgcaacgacgttttgcaccggcatcccgccgccggctgacagatgcagcgaagaaaaatccagctgttgaaactctttattattgagcagggcgttgaataacgtattaacgccagtcatcgccgtaaatggatatttcgccagctccttgaccagaccggggatatcacgcggattggtaatcagcaggttttgcccacccagctcgataaaaagcagacagttcatggttaaggcaaaaatgtgatacagcggcagcgcggtcactaccagctctttccccgggtgcagcagcggcccataggtcgctttcacctgctccagattcgccagcatattgcggtgggtcaacatcgcgcctttcgccacgcccgtcgtaccgccggtatattgcaggaaagccagatcttcagcgacaacctcgggtttgacatactgcatacggtagccatgctgtagcgcgctgcgaaacgagatcgcatctggcaagtggtattttggcaccagacgcttgatgtatttcacgacaaagttaacaaccgtacctttggcggtagaaagctggtcgcccatccgcgtcagaataacgtgctgtaccgacgttttctcgactactttttccagcgtatgggcaaagttagaaacaataatgattgccgccgcgccgctatcgttaagctgatgctcaagttcgcgcggcgtgtacagcgggttaacgttcaccacaatcatgccagcgcgtaaaataccaaatagcgcgacaggatactgcaacaggtttggcatcatcagcgccacacggtcgccttttttgagtcccagcccttgttgtaaataagccgcaaatgcccgactacgttcttctaatttacggaaggtcattacctcccccatattgacgaacgcaggctgatcggcatagcgcgtcgccgcatgttcaaacagttcaaccagggattgataacggtcagggttgatctccgccggaacatcagcaggataacggttaagccaaaccttcttcaatgcatcacctctaaaatgagtgttcgtcgtcatcacaaccccagttaataaacaagtcgttaacattatattaactcagcgtaccagtttattaattacgcaactgaaaggttgcgaagcgcgtcactatttatttttattatgtctctatgaatgcagaaacagcggaccagccgctgtttcttttattgataaaacaaagagttactctgttactatcgtctgaacctccgcgggtccagggttataccatccccaaccgccatagccataaggccaggcgcgtccgccgtaaaaccacggatcgatcggctgtggaggcatgacgacctgctgaacaagatgccagcgtttatagccggtagcctgcatcagcataaatttatacggcgtattgccgattttaccgtcaaccgtgccggttatcgggccgacaacggtaactaactggccacggaagtccaccgggtccagaaaaccgttcacatcggcaaaaattctgccgcgcgaggcttcgcccagaacaggacgcgcgccgctatcaagcggtacggtcgcgatttcaagccgggtttttccctgctgattttgcaccgccacaactttgccgccaaaacgcgcctcttgcccgatatagagctgcggcgcattcatcacccgcaccaaatcctgctgcggcgtcggactcgaacctttaatggcatccgggatagtcacgcaaccgctcagcataagcgcaaaagcgcacgccagcgccccttttattaaccgtttttgaaccgccatgatgcgactcctttttctcgacctctattccaccccacagcataaagtatggggggtaatagtagtgagagtcattctttgccgggaagtttcttccacgccacttcgttacgcaaataaaccggctcggcatgttccacggcaacggtctctcctgccgccagcttttgactggcgatgggcaacatatcttccgctgccgggagcgacacctccccatcatgaagcgtcaggccgcattccttcgccagatcgggccacgcggaccaacccgttcctacggtcgcccactcgccggaaagctgtttcaaccgctcgccgacccgttccggtttcagcaccgcttccgtctcttcgccctgccagacgccctgcgcatcacgctggtattccgcccagtacacttcgcccatccgcgcatcaatcgcggcgagtacgcgggtcgcgccggttttacgccatgcaccctgcgccatcgtggcaagcgttgaaacaccgatcatcggcagatttgcccctaacgccagcccttgcgcaataccaatgccgatacgcacgccggtaaagctgcccggaccgcgcccaaacgccagcgcatctatctcattgagcgaggcgccgctggcggccagaatctcctgcaccatgggcaggatacgttgagtgtgttctcgtggacaaagctcaaagtgagcattgatagtaccgttgttccacagggcgacagaacaggcctctgtggcggtatcgatagccagaattcgcatgaggtttcgtgcttagatcaataaaatagcgcgcatcttaccatactccgtaacaaattactcggcggatggaatcgcaagaaagcgaacggcacgggcgatatcacgcgtgcgcggcgcaggaggcaggctggcgagaaacgtggcgccatagggccgcatcaccagccggttatcacaaatcactaacaccccgcgatcgtccgcatcgcgaatcagccgccccaccccctgcttcagcgtaatcaccgcgtcgggcagttgaacctcatcaaacggatcgccaccgcgcaaacgacagtcttccattcgcgcttttaacagcgggtcgtccggggaggtaaacggcaatttgtcgataatcaccaacgataacgtatcgccgcgcacgtccaccccttcccagaagctgctggtggcgacgagcagcgcgttgccggcgctaacaaattgctgtaacagttggcctttactggtttccccttgcaacaataccggcagcgtcatggtggcgcgaaactgctccgccaaatcgcgcatcatggcgtgtgaggtgcacagcataaaacatcgcccgttattggcttcgataatcggcctgagcatagccgccaactgtcgcgccgcgccgggctggttggtttgcggtaggttacgcggtacgcagagtaacgcctggcgcgtatagtcgaatgggctgggcagtagcatggattctgcctgttcaattccaagacgggcggtaaagtggtgaagatcatcatttaccgacaacgtggctgaggtaaaaatccagctaccgggcttctgttccatcacctctttgaatttgtccgccacggtgagcggcgtcagcgccagggtgaaatggcgcgaggtgcactcataccagtagctgtatcccggctgattgatctcttttaagcgtttcagccgtgaacggtatagcgtggcgcgttcaaaagccgcatccagcagcgccgaacggcccagcgacagcttcgccacgtcgtaacaaagctccagcgtatcatccagcagtaaaaatgcccgttggatacgtgagtcggctaacagttcacgcaaatttccccggtagccgggctcccccagttgcagacgaaaatcctgggcgctctgggcaaggcgatcggcgcatttttgcaactgttgagtgtctttcagttccgtccggtaggcgatggtgatgtcttttgctaaatccagcaactgacggctggagagcgattgtccgaaatactggctggcgatgtcaggcagttggtgggcttcatcgaagatcattacttcagcctgagggataagttcgccaaacccgctctctttaaccaccatatccgcaagaaataggtggtggtttacaatcaccacatccgcgtccatcgcctttttacgcgctttcaccacaaagcactctttgtagagcgggcaatcgctgccaaggcagttgtcgttggtactggtgaccaacggccaggcctgggaatcctccgccacgctgacgcaggtgctgatatcgccatcccgcgtctgatttgaccaggagcgcagcaatatcacgtcgcttaacgtttgtaccggtaaatcgccgcccgccagcgcttgttgttccagccgctccaggcagaggtagtttgaacgtcctttcaacagggccgtcttaccggtaaacgccaacgcttttgctaccgtcggcagatcgcggctgtagagttgatcctgcaacgctttcgacccggtcgaaataatgacttttttcccggcgcgcaacgccggagcgaggtaagcataggtcttcccggttccggtgccggcttcaacaaccagaggctgcgcattttcaatcgcttgtgttacggcaaccgccatttgtcgctgtggttcgcgcggtttaaagccggttatcgctttggccagttggccatctgctgcaaaatcgtccgtcacactgccccctgttaatttgcacagggattatgtcagggtagaaaggcttacgccagttacagaggtgacggcggcgccacattgtggcagtcttgaaccattcaaatgaaaagcaaatgaggaataagtaatgtctatcgtgcgtattgatgccgaagatcgttggtcagacgtggtgatctacaataatacgctgtggtataccggcgtgccggaaaacctggacgccgatgcttttgagcaaacggcgaatactctggcgcaaattgatgcggtgctggaaaaacagggctccagtaagtcacgtattctggatgccactatttttctgagcgataaagcggattttgccgccatgaataaggcgtgggatgcgtgggtcgtcgcaggccatgcgccggtacgctgtaccgtacaggccgggttgatgaacccgaaatataaagttgagattaagattgtcgcggcggtataagccggttattcgtcttcatcctcaaaacgcgccactatccgttcgccggtatggttggcgcgaagttcgcccgccacctgggcaatcgcttctccgctactcataccttgcgacatcaattcctggatacgttctacggctttttgctgttgttcatgactgagtgaaggtaaacctgcaaacatgattaactcctgctaaattgttagcgctaattatttcacgctacccggcggtaagccagtagtgttgtaacgagtcaggaatgatgaagacgttatctcccactgttatcaccttaccctggcgtccggacgccgctgaacactattttgcgcccgtaaaccatttgccctgggcgatgctgctgcattcaggtgatgctattcatccctataaccgttttgatattctggtcgccgatcctgtcaccacactgaccacgcgcgcgcaggaaaccacggtatgtactgcgcgcacgactaccgtcactctcgacgatccgttacacgttttgcagactcaactggaggcgctgccttttcatcctcagcctgaccctgacttaccctttcagggcggcgcgctgggtctgtttggttatgatttagggcggcgtttcgaaattttgcccgatactgccgcgcgcgatatcgctttacccgatatggcgattggcctttacgactgggcgctgattgtcgatcaccaaaaacaggtggtgtcgctgataagctatcacgatgcagacgcccgatatcgctggctcaccagccagcgcgcgccgacccgcacgcccttcaggcttacctcagcctggcaatccaatatgacgcgttgcgagtatggcgagaagtttcgtcaggtgcaggcctggctgcacagcggggactgctatcaggtcaatctttcccagcgttttcaggcgagctacgagggtgatgaatggcaggctttcgaacgccttaaccgcgccaatcgcgccccgttcagcgcctttcttcgtttacatgacggcgccatattgagcctttctcccgagcgttttatccaactggagaatggtcatatccagacgcgcccgatcaaaggtacgcttccacggcttaacgatccgcaggcggatcgtcagcaggcgcagaaactggctaattcaatgaaagatcgcgctgaaaatttgatgattgtcgatttgatgcgtaacgatattggccgggtcgccgtaccaggttcggtgaaagtgccggaactgttcgtcgtcgaaccatttcctgccgttcaccatctggttagcaccattaccgcccgtttaccggactcgcttcatgctaccgacctgctgcgcgcggctttccccggcggctccattaccggcgcgcctaaagtgcgggcaatggaaattatcgacgaactggagccgcagcgacgcaacgcctggtgcggtagcatcggttatctgagtttctgcggcaagatggataccagtattactatccgcaccgtcacggcaacgcagggccaactctattgctcagccggcggcggtatcgtggccgatagcaacgaagaagcggaatatcaggaaacttttgataaagttaatcgtatcctgcacccactggagaactaatacgtggataccagccgtctgacgctcgatcatttcttatcgcgctttcagcttttgcgcccgcagatgactcatgaaacgttaaatcaacgtcaggccgccgtactgatccctgtggttcgccgcccccagccggggctgctgttgacccagcgggctattcatttgcgcaaacacgccggacaggtcgcctttcccggcggggccgtggacagtaccgatgcttcgcttatcgccgcagcgcttcgcgaagcgcaggaggaagtcgccatcccgccgcaagccgtggaagtgattggcgttttaccgccggtagacagcgtgaccggttttcaggtcaccccggtggtcggcattattccgccaaatctcccctggcgcgccagtgaagacgaagtgtctgcggtgtttgaaatgccgctggcgcaagcgttgcaactggggcgatatcatccgcttgatgtttaccgtcgcggcaattcgcaccgcgtatggctctcctggtatgagcattatttcgtctggggcatgaccgcaaacattcttcgtgagctggcgctgcaaattggcgtaaagccctgactgtacacaacgccattcacgttgcctcaaggcggtaacaatcgcctcccccaaagaggcagcctgaagggcaacgtgtatatacttaactttacgcgcgtaagacacgacttgagattactgtcgcaatattagtaaaaacgcggttattcattagtttaattcatgtgaatagttaagctgatgccagcgttccctcttacactatgcgcagttataacatcgtaaccggaagccccggttgccctgtcaggagtattatcgtgattagcctattcgacatgtttaaggtagggattggtccctcctcttcccacactgttggcccgatgaaggccggtaaacagttcgtcgatgacctggtcgaaaaaggattactggataacgttacccgcgtcgctgtcgatgtctacggctcgctgtcgctgacggggaaaggtcaccataccgatatcgccattattatgggtctggcgggtaatgaacccgctaccgtggatattgatagtatccccggttttattcgcgacgtcgaaacgcgcgagcgtctgttactggcccagggacgtcacgaagtcgacttcccgaaagatgacggaatgcgttttcacaacggcaatttgccgctgcatgaaaacgggatgcagatccacgcctggcatgacgacacggtcatttatagcaagacgtactattccatcggcggcggctttatcgttgatgaagagcatttcggccaggaagcgacgaatgaggttactgtaccttatccgtttaaatcggcgaaagaaatgctggagtattgcaacagtaccggcctttcactctccggcatggtgatgcaaaacgaactggcgctgcatagcaagaaagagattgaagagtatttcggtcacgtctggcagaccatgcaggcctgtattgatcgtggtatgaataccgaaggcgtgctgccggggccgctgcgcgtaccgcgtcgcgcctctgcgctgcgtcgtatgctggtttccagcgataagctttccagcgatccgatgaacgtcattgactgggtgaacatgtttgctctggcggtgaacgaagagaacgccgcaggcggccgcgtcgtgacggcgccaaccaacggcgcgtgcggtatcgttcctgcggtactggcttactacgaccattttattgaatcagtcagcccggatatttacacccgctacttcctggcggcaggcgctattggcgcgctgtataagatgaacgcgtctatttccggcgcggaagtcggctgtcagggcgaagtcggggtcgcctgttcgatggcggcggcaggccttgctgaactgttgggcgccagcccggagcaggtttgcgttgccgctgaaatcggcatggagcataacctggggctgacctgcgacccggttgccggtcaggtgcaggtgccgtgtatcgagcgtaacgccattgcttcggttaaagcgatcaacgctgcgcgtatggccatgcgtcgaaccagcgcgccgcgcgtctcgttggataaagtcatcgaaacgatgtacgagaccggaaaagacatgaacgcaaaataccgcgaaacgtcgcgcggcgggttggctattaaagtccagtgtgattaaacgccgtttcccctcccttcgcccatctgctacggatgggcgaaatttttatctcttcctcgtcgactccacgtttccccactacacttgctgtgtcgcggttggcttttgtcgccaacgcttattgggcggcccgcatgcaaacagcacaacggatcatcaatcattatcgccgtaatcgtttcattgtttgcacgatttgtgcactggtcacgctcattcttacgctgagcatccgatttatttcggagcggaacttaaatcaccatcgcacggttgcattcgcgaatcatgccgttgatgcgctggataatgtgctgcatcctctcctggtcggacgaaacatactgctccccttgcttgagcttccgtgcgcgaccgcgcatttgccgttgcgtaagcaagccgcccgcctacaaaccattcgttctatcgggctggtaaaagagggaattctctattgctcaagcatttttggcgcccgtaatactcccatacgccagcttcagcccgatcttcccgcagtcggcgatctgctgctactttccacagaccaatcgttactcaagggaagcccgatcctcattcagtggtatcccgcctctgccgatggccaggatggcgtgatggaaattgtgaatattgacttgctgacgactatgctacttgagccgcagcagccgcaaattaccagcgccagcctgacggtcggcaaacgacacctgttatatggtcggggcgtggtcgatactcttccggaattaaaaaaagatgaagagcgttaccagctttcatcgcgacatttcccttttactatcagcgtcagcgggccgtcggcaggcgtactggcgttcaaacatctcccgacgcagttaccgctggccgtattgcttagcctgttgatcggttatatcgcctggctggcaacggccagcagaatgagcttttcctgggaaattaatctggcccttgccgaacgggagtttgagctattttgtcagccgttgcttaatgcccgcacgcagcagtgtaccggcgttgagatcctgttacgctggaacaacccgcgccagggctggatctcaccggatgtttttattcctatcgccgaggaacataacctgatagcgccgctgacccgctatgtgattgcggaaaccattcggcagcggcactacttccccatcaaccatcagtttcatatcggcatcaatgtagcggcaagccatttccgacacggcgtgcttctcaaagatcttaatcagtactggtttagtgcggaacctgttcagcaactggtgctggagctcacggaacgcgacgcgttgcttgacgttgattaccgcctgatgcgcgagctgcatcgtaaaggcgtgaagttagccatcgatgattttggcacaggaaacagctcgctctcctggctggaaaaactgcggccggatattttgaaaatcgataaatccttcaccgccgccatcggtaccgatgcggtcaattcaacggtgaccgatattattatcgcgctggggcaaagactgaatattgaactggtggcggaaggggtcgaaaaccagacgcaggcacagcatttgcgccagcatggcgtgcaaatgttacagggctatctctatgcgaagccgatgcccattagcgaatttccacagtggctggcgggcagcgcgccgccgcccgcccggcataacggacagattatgtccgcgatgccgcatctatagacttgattcctgcgtgtgacgttattcctcttcgtcgtgggcaggctgttctttaacaattcgaaccagatcgacacgatagtcgttggcctcgacaatggtgatccgcaggggcggaacatcaatgacatcgcctacacgaggaatatggccattagcggcgatcactaaccccgcgaccgtcgcaatatcgccctcttcgttcaccagatggtcaacttccagcgcctgctgtagcgcatggagatcggtgccacccttcactatccagccctcggcatcggcaacgatttccggcgtttcatcggcatccgggaactcaccggcaatcgcttccagcacatccagcggcgtaaccagcccctgcaccacgccgaactcgttagtgacgataacgaaactgccgcgcgcgcggcgcaaaacgcctaacagattgataggatcaagcgtttccggcaccactatcgccggggaagacgcggcgatagccgcaacatccgcgccctcttccagcgccaccagcaactctttcgcgcgaacgataccgataatttcatccagctcgccccgacataccgggaacaggctatgcggagaagagagtaactgctgacggatttcagctacgctgagattcgcatccacccaactaatttcgcctcgcggcgtcataatgccgcgcagggagcgcgacgccagagtcagtacgccgttaatcatgtagcgttcttcttcggcgaaggcgccttccgacaccgatatcgcggccgggctatccgtttcatgttgcgtactcgcctggcgtttaccgcccatcagacgcaggatagcgtccgcagtacgcgcgcgcagcggcaacgtggactgatgacgaataaagttgcggcgcgcaatctggttaaacacctcgataacgatcgagaaaccaattgccgcgtacaggtagcctttcggaatatggaaaccaaacccttccgccaccaggctcaagccgatcatcagcaggaaactcagacagagcaccaccaccgtcggatgctggttgacaaaacgggtcagcggttttgacgccagtagcatcaccgccatcgcaatcaccaccgccgccatcataaccggcagatggtttaccatacctaccgccgtaatcacggcgtccagcgagaagaccgcatccaggatgacaatctgcgtgactaccacccagaagctcgcatagcctttaccgtgtccggtgtcatgctcgcggttttccagacgttcatgcagctcggtggtcgctttaaacagcaggaatataccgcccagcagcataattaaatcgcggccggagaaggtaaaatcccagacggtaaagagcggctttgttaaggtcaccagccacgaaataatggacagcagcgccagacgcataatcagcgccagcgagagcccgataagacgcgctttgtcacgctgctttggcggcaatttatcggcgaggatcgcgataaagaccaggttatcgatacccagaacaatttccaggacgacgagcgtgagtaaacccacccaaattgagggatccattaataattccatgacaagctcctgcttaaggaatgactaaacggcgcccacaacatctcaaaggatgcaggcggtaacgcaataaacaaagtaaggctatggcaagatatgccagattgacaggcgcaaaacggccaaagagtgaaatgacgtcggtgacgatccatacaacgggctgctgccctataccccattctaattaaacggaagctaaacataacagagacaactggtttttggcaaagatttaccttcctttgcaaagagatgtaaccaggatattttacacttcgaaatttctcattatcgaaaacaaaattacggatctccatcacacaaaatatttttttcgatatctaaaataattcacgaaaatcatgcgtttttcgttgtaaccctcatctgaatcgattcgcttgcggacggcgattcaaaaaatacatctgtcaagttgatgtgttgacaataataaaggaggtagcaagtgaccattgctattgttataggcacacatggttgggctgcagagcagttacttaaaacagccgaaatgctgttaggcgagcaggaaaacgtcggctggatcgatttcgttccaggcgaaaatgccgaaacgctgatcgaaaagtacaacgctcagttggctaaactcgataccagtaaaggcgtgctatttctcgttgatacatggggaggcagtccgtttaatgctgccagccgcattgtcgtcgataaagagcgctatgaagttattgccggcgtcaacatcccgatgctggtcgaaacgtttatggctcgtgacgacgatccgagctttgacgagctggtcgcactggcggtagaaaccggtcgtgaaggcgtaaaagcgctgaaagcgaaaccggtagaaaaagccgcgccagcgccagtcgccgccgcgccaaaagcggccgcaccggcaaaaccgatgggcccgaatgattatatggttatcgggcttgcccgtattgatgaccgcctcattcacggtcaggtcgctacccgctggaccaaagagaccaatgtcagccgtattattgttgtgagcgatgaagtggcggcggataccgttcgtaaaacgctgctgacgcaagttgcgccgccgggcgttacggcgcatgtggttgacgtcgcgaagatgattcgcgtctacaataacccgaaatacgccggcgaacgcgtgatgcttctgtttaccaatcctaccgacgtcgagcgcatcgttgagggcggcgtgaaagtcacttccgtgaacattggcggtatggcctatcgtcaaggtaaaacgcaggtgaacaacgccgtttccgtcgatgaaaaggatatcgaagcctttaaaaagctcaacgagcgcggcatcgagcttgaggtgcgtaaagtttccaccgatccgaaactgaaaatgatggatttaattgccaaagtggcgaaataaccgccggcatttaattagctttcacacttaagatagcaataggagaagtacaatggagattaccactcttcagattgtgctggtgttcatcgtcgcatgtatcgcgggtatggagtcggtacttgatgaatttcagttccaccgtccgctgatcgcctgtaccttaatcggcgccgttctgggggacatgaaaaccggtattatcatcggcggtactctggaaatgatcgctctgggctggatgaacatcggtgctgccgttgcgcctgatgccgcactggcgtccatcatctctaccgttctggtcatcgccgggcatcaaagcattggcgccggtatcgcgctggcgattccgctggcggcggcaggccaggtactgaccattatcgttcgtaccatcaccgtggcattccagcacgcggcggacaaggcggctgaaaacggcaacctgacggcgctctcctggctgcacgtttcttctctgttcctgcaggcaatgcgtatcgctatcccggcggttatcgttgccatctccgtaggcaccagcgaagtacagggaatgctgaatgcgattcctgaagtcgtcacaggcggtctgaacatcgccggcggcatgatcgtcgtggttggttatgcgatggttatcaatatgatgcgcgcaggctacctgatgccgttcttctacctcggtttcgtcaccgcggctttcacaaacttcaacctggtcgcactgggtgtcatcggcgcagtgatggctattctttacatccagctgagcccgaaatacaaccgtgtagcgggcgcgcctgcagcggctgctggcaataacgatctcgataacgaactggactaacaggtgagcgaaatggttgatatgactaaaactaccaccgagaaaaaactcactccgagcgatattcgcggcgtatttcttcgttctaacctgttccaggggtcatggaacttcgaacgtatgcaagcgctgggcttctgcttctctatggtgccggcgattcgtcgcctgtatccggagaataatgacgcgcgtaaacaggcgattaaacgtcacctggagttctttaacactcatccttacgttgcggcgccggtactgggcgtgaccctggcaatggaagaaaagcgtgcgaacggtgcagagattgacgatggcgctatcaacggtatcaaagtcggtctgatgggaccgctggcaggcgtcggcgaccctatcttctggggtaccgtccgtcccgtattcgcggcgctgggcgcaggtattgcaatgagcggcagcctgcttggtccgctgctgtttttcatcctgtttaacctggtgcgtctggcgacccgttattatggcgtggcttatggctaccgcaaaggcgtcgatatcgttaaagatatgggcggcggcttcctgcaaaaactgactgagggggcgtcaatcctcggcctgtttgtcatgggggcattggttaacaagtggacgcatgtgaatatcccgctggtggtttccaccatcaccggtcaggatggtcagacacgcgttaccaccgtgcaaaccattctcgaccagctgatgccgggtctggttccgctactgttgacctttgcctgtatgtggctgctgcgtaagaaagttaacccgctgtggattatcgtgggcttcttcgtcattggtatcgccggctactccgtaggactgctgggccagtaaggctgttgtacactaccggggccaaacggccccgttttttatttctctggaggataaatgactatcacggacctggtgctgattctctttattgccgcattattggcttacgctctctacgatcagttcatcatgccccgtcgcaatggccccactctgctttctatagccctgctccgccgcggtcgcgtagacagcgttatcttcgttgggctggtcgccatccttatttataacaacgtaaccagccacggagcgcagatgaccacatggttattaagcgcgctggcgttaatggggttttatatattctggatccgcacgccacggatcatctttaaacaacgtggctttttcttcgccaatgtctggatagaatataaccgtattaaagagatgaatttatcggaagacggcgtactggtgatgcaattagaacaacgacgcttgcttatccgtgtacgcaatatcgacgatctggaaaaaatatataaacttcttattgaaaatcaatatcttaagatatagcctcaactatgtttttcgaattttatttcgaatcataatatagctaaggctatattttctattgaccaattgttatttaatttaacgttttattgatgaataaatctaaatgaaaatcgttttcaattgaaagacaaataatattttatcgctgttgttttatattctaaaaatatgttaatgttgcgccgtcaattggggagtagccgatttccagactccggaaatgtacgtgtcaacatactcgttgcaaaacgtggcgcgtacggaccagccgccgctggtcaggcgagaccataggcgcatcaactgctgtgtatttcgtcacagaatggcgacatgcatgtttgctgggggcagtgatgtgtttaatggataccccggtcaggacgttgtcatgcactttactgctactgttcttctcgctttcggcatgtcgatggatgctttcgcggcatcaattggcaaaggcgccaccctacataaacccaaattctcagaagcgttgcgtaccggtcttatctttggcgcggttgaaacgctaaccccgttgatcggctgggggctggggatattggcgagtaaattcgttctggaatggaaccactggatagcctttgttctgctgatctttctgggcggacgcatgatcatcgaaggtatccgcggcggtagtgatgaagatgaaacaccgttacgtcgtcacagcttttggctattagtcacgacggctatcgcgaccagcctcgatgcgatggcggttggcgtcggtctggcgtttttgcaggtaaacatcatcgctaccgcattagctatcggttgcgccacgcttatcatgtccaccctagggatgatgatcggtcgctttatcggcccaatgctgggtaagcgtgctgaaattctcggcggggtcgtactgataggaattggcgtccagatcctctggacgcattttcacggttaacggttacgctgccagagatgaaggttgaaatccgtctggcagctaagtccggcgctggcagccagttgttcccacacgtctggcctggcgcgccaggcaaatggcgtcatttgcaacagtgctacagccgcttcggcggtgagctgcatgtgataagcaaggcgggtactctgctgcaatgtgaatccgtcgagctgctcggtatacggcgcatgtaaacgcacctcatcataaatgagcccttttagttccatcagatgatgcggccctggcgtggcggtaacgacccaaccaccaggtttcaccacacgcgccaattcctgcgccttacacggggcgtagattctgatcaccgcatccattgacgcatcggcaaagggcagtcgatggcttgacgccacacaaaacttcacctgcgaatagcgtttcgccgccgctttgatcgccgttttagcaacgtccagtccaaacgtggtgactcccggcaacgcctcggcaaaagcatgagtgtaatacccctcgccgcagccgatatccagaatcgccgtggccgactgatccagccgctcgcgcaacaggttaatcacggcatcgcgcagcggctgataatggcctgcatcaagaaacgctctcctcgcctgcatcatttcggcgctgtcgcccggatcgcgcgaacgtttatgctgtaccggcagcagattgatgtaaccctctttcgccacatcaaactgatggcgctgtggacatataacgctgttattaatctgcgtaagcggctgatggcaaagcggacaggtaaacgacatgacaactccggactggggcgctaaagggcgcaagtgtaacgcgaattgcgccccgggaaaatcctttacgaacccggaaccgcaacgtggctgccatgcatcaccagaaggtgatctgaatcggctggcataccgtctggctcaacattttccagccgcagcacatcgcccatgatctggctgaatacgggcgcagataccgcaccgccataataagccccattttgcggattattaatcaccaccaccagcgcaaatctggggttacttgccggcgcgacgcctgcggtatatgccacatacttatcgacgtatttaccatcatcgccaatttttttcgccgtcccggttttgaccgcaatacggtagtctcttactgcggcttttgttccgccgccgccaggcaacgcgacgctctccatcatatgttccacctcgtgcaccagttcttccggcattacccgcgtgccgatcacgggcggatcaactttggtgatcgataacggacggtagataccaaagctgccaatcgtggcataaacatgcgccagttgcagcggcgtcaccattaatccatagccaaaagcaaaggtagcgcgatctaaatcactccagtaacggcgtttcggtaataacccgctgctctctccggtgagacccagtccggtaggcacgccgaaaccaaagcttttataagtatccattaatttctgcaccggcatcgccagagaaaggtgagaaacgccggtatcgctggatttttgcaaaatgccggttaatgtcagttccggatagtaaccgacgtcgcggatacggtgtccatcgagagtaaaaggatgggtatcgataacgctgtccggctgcacgatgccctgctgtaacgcagtcataatgaccaatggcttcacagtagaaccgggttcgaaggtgtcgctaatcgcgcggttacgaaaatcgtccaactgcgcgccttcacggttgttcgggttgaaatccgggtagctcgccatcgagagaatttcacccgttgggatgttaatcaatacggcagcgccggattccgctttgttccagatgacggcgttatccagcgcatcttcggtaaccgtttgcagacgttcatcaatgctaagctgaagttcatgagcaggaaccggattcacttccgtaatgttctcaataacgtgaccaaatttatctttacgcaccaatcgggagcccggttttcccgtcagttgcgcgttaaagctcttttcaataccttctattccctgcccgtcgatattggtaaagccgatcaaattggccgctacgtgtccggcagggtaaaaacggcgcgactcttcccgcaggttaatacccggtagattcagtttatctatccattcggcttgctggggtgaaacctggcgcgcaaggtagataaaacggcctgccgggttactgtttacccgttccgcaagcgtactgagagacagatgcagggcgctggccagcgcctgccagcgctcattgtagccaacgccgcctttgcttatgatagtcttcggatcggcccagacagcattaaccggaacgctcaccgctaagggtcgcccttctctgtcggtgatcatgccgcgtggagaggccgtggtcacttcacgaagcgagcgcatatcttcttgtttcaccagtttcgacggcgtaacaatttgcagccatgccacccgccctaacaacaatgccatactgagcagaatggcagtgcaaagtagtgcaaaacgtatgggcgtaaaattacgggtatcgccgtcgcttttctttttcacctgatctccagccgaatcatttttcaggtgattgatttaacgggaaacggccggaaaaaccagaaaaaacaatgctaataacatcgcgcctttgcaacaaatcgctaacgagagcgcatccagacacattttgaaggatattgaattaaaaagccccgcttttagcgaggctttatatctgaggctgacgcgacaaacgcatcaaatcagtggtgtcgatcagatagctgttacgttaacagcagccggacctttctggccgtcctgaatttcgaactcaacgttctggccttcagccagagttttgaaaccattgccctggatagcggagaagtgtacgaacacatctttgctgccgtcagccggagtaatgaagccaaaacctttggattcgttgaaccacttaacttgacctttaatctttgccatttgcaaaattccttagagtgttttctttgcccgtaggcataacatagataaaactgagacattactgcttgaggcactaatataaggttcggcagagaagcggtattcaacgtcaacgtgtttactcaggacttctttactgaaaatgccacacataaacagaactgtacctcgtttaacccaaagcctgttatcacatacaacgttaattatggcaagccatttttaaacgtgtctcgatccgtcgcacaaattacgagaaccttcacaaattgacagcacgtttatgcaacaaaattgcgaaagatatatcctcacgcgctgacggactcctgacaacgtcactgctgaaaagccatttttctaccatagctcaataacttcgcttcttccagtgcatcaaatcacatttaaaagctgtatttttcatatcactttttatgctgagttatgcataaattgtcacaatgataaaaaacaccttttaatcaaaataatagaaaagaaaagcgattttcggcaccgctttttgtgatgttctgcgtctttacagaatgccttaaaataatgaacaaacaatgacaatccataaagagagagaaacgtttcgcttttaatagagaatgagcggtatcacaaaaatgccatatgtccatttgttatacatataaaactatgttgcatataaagccatatattatgtaaggtgttgatgctgtagtatcagttgcaaacggcaacgcggagagatccgacggggaaatggggcgtatggcactggcgccatttgcgccccggtaagcattatcgttctgcaaccagacgaatgatgtcctcatcctcttttggttcgcttgccgctgttgcgggttccgcttctttttctggttcgtttgcttcgcaaaggcgacgtaacaacgcgttttgccgcttctgttgatccaataacgcttcgagcaattctatctgctcgttggcacgggagcttgcccggttgacaaagaaccagagcgccagccccaccaccagaaccaccattgatactattaaagatgcaagagaaaacgcaccagagtttaaaacgtcgttcatttcaccacctcaatgtagagacgtcattctaccactgctacacgggaaggaaatctctggtgtaaaacgtttaccagggaataaatttattgatggcgcaaataccgctgaaaaattgtacatcctgatcgcacatgatattaaacacctgcgcccacagcaacaggcatactaccaccacgatgccgagaacgacccatcgaaattttttcactccactctccgatcttacatcttatgtcgctaaattatcatgagttacttaaaccaggagtaactgtagcggcattatatgtttttaggaatgattcacttgtttcaatcaatgtacacgctactcttattctaactaaaaaagaaaagaggtagtaatgcgtttgatcattcgcgcaattgtattgtttgccctggtgtggataggcctgctgatgagcggctatggcatcctggtgggaagtaaagtgaacgctgcggggctgggtttacagtgccattacctgaccgcacgcggcaccagcacggcgcaatatctccataccaacagcggcattattggcttttccgactgtcccattttcagaaaaatcgccaccgtggtggataatggctaagcggcaataaataatttcacagtgaaactatcaccaataattcccctatattggctgttgttcataagtactgttaaataatattttaataaccgttaaataagccgacagatattatctacttttacgatttcatcccacccgatgttataaaaaaagcagctacatttttcgtagctgcttttttttaacgtcatgctaataacgttgcttagaagggataatcgttgtaacccatttgttcagaaattttacgcgcggcggcgtgtaacatagccacatattcctgtaggcgttcttctgaaaaacgcagcgtcgggaacgaaatgcttaaccctgcgatgactacgccaaaacggtcaaataccggtacgccgatacaacgtaatccttcttcctgttcttcgttatcttcaccgtatccttgcgcacgcacttcatccaacagcggcagcaacgcttcagtgctggtaatcgtgcgtcccgtgctttgcttatactctacgccgtcgagaatctgcttaacctcatcacggtcgcgccaggccagaagcactttaccgatggccgtactgtacagcggattacgacgcccaatacgtgagtacatccgcagattgtacatagagtcaattttatggatatagacaatgctgtcttcatccagcgcgccaagatggatagtttcttttgtcagacgagacagttcgcgcatctgaatgtccgcactgcggatgagatcaacattttgcaaagctcgcgcgcccagctcaaacagctttagcgtcagagagtatttttcagactccccctcctgagccacgtagcccagcgttttcatggtttgcaaaaagcgataaacggtgcttttcgacatcatgacgcgctgcgatagctcggtaatccctatttcacgctcttcacccagcgcctgcagaatgccgaaaactttcagcacagaagatacagaatcaggctgcttatccagatctgcgtttgccatttatcacctcattacgagcgttttataaaattcagaacgagtttttattataatttcacgccaggtcgcccgcaatccatctttgcttacttcgttacaaatctgcgacataacaactcagtattaatgctaacattattattcagctcataactccccttattacaaaatacttatggaaaaaacacgggccgatggcctgcccctcccgcagagatacggcgctatcctgacgattattatcggtatttcgatggcggttctggatggcgcaatcgctaatgtcgcgctgccaaccattgcgactgatttacatgcctcccctgccagctctatctggattgtcaatgcgtaccaaatcgccattgtcgtctcactgctttccctgtcttttttaggcgacatgtttggttatcaccggatctataaatgtggtttagtggtatttctgctttcatcattgttttgcgcgctttcagactcgctgcagatgctgacgctggcgcgcatcgcgcagggatttggcggcgcggcgctaatgagcgtaaacacggcgctgattcgtcttatctacccccagcgtcatctgggacgaggcatgggaattaactcttttatcgtcgccgtctcttccgccgcgggtccgacgatcgccgcggcgattttatccatctcatcatggaaatggctgtttctgattaatgtcccgttaggtatcatcgcgttaattctggccatccgctttttaccagcaaacatcgcccatgacactaagccgcgctttgacttaccgagcgcggtaatgaatgcgctcacatttggcctgctgattaccgcattgagcggatttgcccagggacagtcgctaacgttgattggcgcagagctgctcgttctggtcgtggtcgggtttttcttcgtgcgccgccagctttctttgcccgtccctttgttacccatcgacttgttacgcattccgcttttttcactctcgatcggcacgtcaatttgctcgttctgcgcgcaaatgttagccatggtctcgctacctttttatctgcaaaccgtgctgggccgtagcgaagtagaaaccggcctgttattgacgccctggccgctggcaacgatggtgatggcgccgctggcgggatacctgatagaacgtcttcatgccggtttgctgggggcgctgggaatggtgataatggcagccgggttgtttgcgctggtcatgttgcctgcctccccctccgatctgaatattatctggccaatgatcctttgtggcgcagggtttggcctgttccagtcgccgaataatcacaccattatcacttccgcgccgcgtgagcgcagcggtggcgccagcgggatgctgggcacggcgcgactgttaggccaaagtactggcgccgcgctggtagcgctgatgttgaaccagtttggcgatagcggtacgcatctttcgctgctcgcagcggcgatcctggcgattctcgcggcggtagtgagcggtttacgtattacgcaaccacgcgttcaggcgtaaaaaaagcgcgtcattcgacgcgcttttcatacttgccagtgggcttattatttcaggtactcgccgctacgcagcgcttcaatgcgtttatccagcggtgggtgcgtcataaacagctcgcttaacgatttcgatttaccgttaatacaaaacgccatcatgctggtcgcttcttgcggctcgtagctggttttcaggcgctgcaacgcggcaatcattttttcacgaccaaccagcttcgccgatcccgcatcggcatgaaactcacggtaacgggagaaccacatggtgataatgcttgccagaataccgaagaccagttccagcaccgtcgcaacggcgaaatagattagcggattaccgttacttccttcgccttcatcacggttgccgcccagaaaacctgcagcaatttgcgcgataatgcgcgaaataaagataacgaaggtgttaaccaccccctgaatcaacgtcatcgtcaccatatcgccattggcaatatggctgatttcatgcgcaatgacggcttccgcctcgtcagggctcatattttgcaacagaccggtgctcacagcgaccaatgaggcgtcacggcgggcgcccgtcgcaaacgcgttaatgtccggcgcatggtagatagcaacctgcggcatggcgataccggcctggcgcgcttgcgttgctacggtgttcatcaaccagcgttctctttcattgcgaggctgttcaataacttcccctcctacggattttaacgccatccatttggacatcagcaatgaaataaaagaaccgccaaaaccaaacagcagcgccatgatcagcaagccttgcacgctgctcgactgtatccccgtcaggctcagaaccagcccgaaaacgaccatcacggccaggttcgtcagcaggaagagcgcgattcgcatcataattttcttttaacctcaatttaacaaagcgcactatgcgattacccacatcgtatgggtcttatggctattttcaagcatcaccaggcggtaagtcacgagaaaaacacaactttacattttgtagcattatcctgacgacttctgcgcttgttaaaaaaaaacaggcacaattttttgtgcctgtttagcgttacttattggctgccgcctgctccgctggtttttctttttcaagatgcgccaggtccagagcaatcttcaccgtttcatcaaggtatgggtccggctcctggtaatcctttggcagatcgtccagtttcttcagcaacggtttaccctcgcgtttaaaccgatcgttaatacgcgccagacgcagagcgtcttcttcattgttctctttctcacgctgcgcataattcagagagacgatgttgcgcttatccttcatggcattgaaacgtgcgatatccttcatgatgtactggaactcaggatctttggcgatacgcgcgttgtgttctttcaataattccgggccaaacggggccaaatcgtccgatttcacgtatttcgccgcatcaatgctatcccacggcaaggcgttatcttcaaatttttctccggtttccgtctcttcattgccagtcggcatgatgatatccggcgtgacccctttacgctgcgtactaccgccgttgacacggtaaaacttctgaatggtgtactgcaccgaacccagcgcaggccattccgggcgaagcatctgatcgtaaattcggtttagcgaacgatattgctgtaccgtacctttaccgaaggtcggctcaccgacaatcagcgcgcggccataatcctgcatcgcggcagcgaagatttccgatgccgaggcactgaaacgatcgaccagcaccaccagcgggcctttgtagtagaccacgccgtcggtgtcgctatcctcacgcactttaccgttattgtcgcgcacctgaactatcggaccagaagggataaacagaccggaaagcgaaacggcttccgtcagcgccccaccgccgtttgaacgcagatcgataacgatgctgttaacgttctgtttttccagcttctgaagctgaactttgacatcatcggtcaagccaacatagaagcctggaatatccagtacaccaactttttccttgccgacggttttcaccgacattttaaccgcgcgatcttcaagacgaatccgttcacgcgtcagcgtgataatacgcgttttcgtccctttgccagccggcagtatttccagtcgaaccttgctgcctttcggccctttgatcagcgccaccacatcgtcaagacgccagccaataacgtcgaccatcggttttccggcctgccctacgccgacgatacgatcgccgacgctaatcgacttgctcttcgctgccgggccgccggcaaccaatgagttaatgacagtataatcgtcatccatttgcagcaccgcgccgataccttccagagacaggctcatttcggtattaaactgctcggtattgcggggagaaagataattcgtatgcgggtcgatttcacgcgcaaaagcggtcatcgccagcgagaacacatcttcactgttggtctgcgccaggcgacgaatagcgaatttgtagcgacgcgtcagcgtttcgcgaatttctttgtcgctcttgccggtgagtttcaggctgagctcatcgaatttcactttaccatcccacagcgcatttagctcagcctcatctttcggccagggcgctttactgcggtccaggttaaacgtatcgtttccggtgaaatccattggccgttccagcacttttagcgcgtactggtaacgttcaaaccggcgcttttgcgccaggttataaagatcgtaaaaaacatccagcttacccgtgcgcagctcatcgcccaacacggttttctttttcgcaaactgctcgacatcgctcgccaacaaaacgttgtggctatagtcgagaagattcagatagcgatcaaaaatctttgccgaaaatgcctcatccagatcgaactggcgataatgggagcgggtaaaacgcgacgttacgcgctcgctcaccgtcgcatgttgcgtctcttcctttagtacgggaatttgatcggcacgcgtaatatcttccacggcgaaggactggcctgctaatgcaagcaggccagctaacgcggtaagcctaaaaaaagtgttcatgccaggcctggcctccgtttcagaacaccaggtgttctgcgcgtacaatcaaagacatacccgaattcagctgtacacggacaccatctttggtgatttctaatacggtggcatccatcgcattattacccgctttcaccttgagggactgccctacggtcaatactgaaatatcagaaaccggcgtgtgcttctcttcgcgaggcgcacgcggcgctttcgtcgtcggtttatcagcgcgaggtttacgttcagcgccttctttacgacgcgctaccgggcgaggtttacgctcgcgtcgcggcgcgtcttctttttcgccagccgccgcggcagcttcgcgttttttcgcttgctgctctgcgcgctgcgcctgaacacgggctttggcttcttcaagctgcttacgcgcatgttcgacatgctgttcttccagctcgccgcacggattgccatcaaggtcgacgcgcgttgcgcccggcttaacgccgtacaggtaacgccagcttgaagtataaagacgtaaagcggaacgaagttgcgttttgctgaggttcatttcgcccccaactcgctctaccagatcctgaaaaataccaattttcagcgggcgagcttcgccttccgcactaaaacagtgaggaaaacgctcggccagaaacgcgataacttctttactgctattcaacttaggttgattttccatgaaatttcctgattacaacggacgtagccaacaagcagcaggcatgaacaggcgtcattataatgacgccatcagtaattgctacgttatccgttgattatcctgcgacgctcgcaaagaattttttgtaatccgtcgttgcaagcacggtttcaagctgtgcgaccagcgtacgcaggccgtgttcatcttcttcggtaaaacggccaaacgccgtgctatctatatccagcacgccgataatccgttcgccaaccgtgacaggcagcacaatttcggcgttgctggcggcatcacaggcaatatggccgtcaaacgcatgaacatcatcaatacgttgaaccttattctgcgctaccgctgcgccacacacgccgcgaccaaccggaatccgcacacaggcgattcgcccctgaaacggccccaacaccagcgtatcgccttcgaggagataaaatcccgcccagttcacctcggtaaggcgttcgaacagtagcgcgctggtattcgccagcgtggccagaaagctggtttcacctgccattaacgactgaaaatcgcggtttaacgccgcgtatagttctgttttgctcattatataatcacttcgtggtcttactcctaaacacaggctattaaaataagcattaaatgcgttcttgctcaagattattcctgtcatgagttaagattacattattctaacactttgattcacgatacatggctctgaacacctcacacgtcacgccaacaaaaaagctaacgatcaggtcaattagcgaagcgctgccgcgcagccactaccagcgctgccctgaatgcgacatgctgttcagcttgccggagatgagcgctcatcaaagcgcttattgtcctcgttgccaggccaaaattcgcgatgggcgcgactggtcgctgacgcggctgaccgcgatggcggtaaccatgctgctattgatgccgtttgcctggagcgaaccgttactccatatctacctgttgggcgtacgcattgatgccaatgtgatgcacggcatctggcaaatgacgcagcagggcgatccgttaaccgccgcaatggtgctcttttgcgtggtgggcgcgccgcttattctggttttttcaattgcttacctgtggtttggcagccttctcggcatgaatctgcgtccagtcctgctgatgctggaaaaactgaaagagtgggtgatgctggacatctatctggtcggtattggcgttgcctctatcaaagtgcaggactatgcctttctgcagccgggcatcgggcttttagcgttcgtctcgttggtggttcttagcattctgactatgattcatctgaatgtggagcaactatgggaacgattttatccgcagcgccctgctcaacgtgcggacgaaagattgcgcgtctgtcttggctgccactttagcggctatccggatgcgaaaggacgctgcccgcgttgtcatattccgctacggttacgcagaaaacagagcatacagaaatgttgggcggccttgctggcgtctattgtctttttgctgccggcaaacctgctgcctatctcggtaatctacattaatggcgggcgtcaggaagatactatcctgtcgggcattatgtcgcttgccagcagcaatatcgccgtcgccgccgtcgtttttatcgccagtattttggtgccgtttaccaaagtcatcgtgatgtttacgctactgttgagtatccattttaaatgccaacagggactgcggacgcgaattctgttgctgcgtctggtgacatggataggccgctggtcgatgcttgatcttttcgttatctcgttaaccatgtctctgattaatcgcgatcagattctggcttttactatgggaccggctgcgttttatttcggcgcagcggtaattttgactattcttgcagtggaatggctggatagccgcttactttgggatgcacatgagtcaggaaacgcccgcttcgaagactgaagcgcaaattaaaaccaaacgccgtatttcacctttctggctgctaccgcttatcgcgctaatgatcgcggggtggctggtatgggatagctaccaggatcgcggcaatagcgtgactatcgattttatgtcggcggacggtatcgtaccgggccgtactcccgtgcgttatcagggagtagaagtcggcaccgtggaagatgtcagtctgagcaaagatctgcgcaaaattgaagttcgcgtcagtatcaaatcagatatggaagatgcgttgcgcgaagagacgcaattctggctggtgacgcccaaagcctcgctggcgggcgtttccggcctggatgcgttggtcggcgggaattacatcggtatgatgccaggtaaaggcaagcccagagatcatttcgtcgccctggatacacagcctaaataccggcttagcaacggcgatctgatgattcatctccatgcgccggatctcggttcgcttaatagcggttcactggtctatttccgtaaaatccctgtcggacgggtgtatgactattcgattaaccctaacaaacagggcgtgacgattgacgttctgattgagcgacggtttaccgatctggtgaaaaaaggcagccgtttttggaatgtctccggcattgacgccgatctaagcctgagcggcgcgaaggtgaaactggagagcctcgcggccctggtcaatggcgcgattgcgtttgactcaccggacaattccaaacccgccgcccaggatgacacgttcggcttatataaagatttagcccacagccaacgaggggtaatcgttaaacttgagctgcccagcggagacggtctgaaagcggaatctacgccgctaatgtaccagggactggaggtgggtgagctttctaaactgacgctcaaccctggcggtaaagtcaccggagagatgaccgtcgatcccagcgttgttccgctgatgcgggaaaatacgcgtattgagttacgcaatcccaaactgtcgctaagtgacgcgaatatcagttcgttgttaaccggaaaaaccttcgagctggtgccgggcgacggcgaaccgcgcagtgaatttgtggtggtgccgggtgaaaaagccctgctgcatgaggcgaatgccttaaccctgacgctgacggccccggaaagttacggcatcgaaccgggccagccgttaattttacatggcgtaaaaattggccaggtcattgagcgcaacttatccagtaaaggcgtgtcattcatcgtcgcgattgaaccgcagcaccgggatttggtacagggcgacagtaaattcgtggttaacagccgggtggatgtcaaagttggccttgacggcgtagagttcctcggcgccagcgccagcgagtggattgacggcggaattcgtattttacccggtacgagcgggaagatgaaatccacctacccgctctatgctaacctggaaaaagcgctggaaaatagcctcagtgacttaccgactaccaccttaacgctgacggccgaaacgttgccggatgtccaggcaggttccgtcgtgctgtatcgaaaatttgaagtaggcgaagtcatcaccgttcgcccacgcgccaatacctttgacatcgacctgcatattaagccggagtatcgccacctgttaaccagcaatagcgtgttctgggcggaaggcggcgcgaaagtgcaacttaacggcagcggcctaacggtacaggcctcgccactctcccgcgcgctgaaaggggccattagttttgataacctgagcggcgccagcgccagccggcgcaaaggcgataaacgcattctttatgcttcagaaacctccgcccgcgcggtaggcggacaaattacgctgcacgcgttcgacgccggaaaattggcggaagggatgcccattcgttacctcggtattgatatcggccagatccagacgctggaattgatcaccgcacgtaatgaagtgcaggcaaaagccgtactttatccggagtatgtacagacatttgcccgcgccgggacacgtttttccgttatcacgccacaaatttccgcggcgggcgtcgagcatctggatacgattctccagccctatattaacgttgagccaggacgcggcgcggcacggcgcgactttgaactgcaggaagccacgattaccgactcacgctatctggatgggttaagcatcgtcgtggaggcgccagaagcaggctcgcttaatattggtacacccgtcctgttccgcggtatcgaagtgggaaccgtcaccggaatgtccctggggtcgctctccgatcgggtgatgatcaccttgcgtatcagtaagcgttaccaatatctggtgcggaataactccgtattctggcttgcctccggctatagtctcgactttggtctgacaggcggcgtggtgaaaacggggacatttaatcagttcatccgtggcggtatcgccttcgctactccaccaggtacgccgctggcgccaaaagcgcaagccggtaagcatttcctgttacaagagagcgaaccgaaagagtggcgtgaatggggcaccgctctgccacgttaaacaccaggctccggcgtactcgcgccggagcgttttatgctacactgcgcgcctgtttttttgccggcgatacacctgtggctcaacacgctgtctattttcctgacgcttttctgacgcaaatgcgtgaagcaatgccttccacgctctcttttgatgaatttatttcggcctgccaacgcccgttgcgccgcagtatacgcatcaatacgcttaaaatatccgtggctgatttccttgccctaatcgcgccctacggctggtcgctcacgccaattccgtggtgtcatgaaggattctggatcgagcgcgatgatgaagaggcattgccgcttggcagtaccgctgagcatttaagcggcctgttttacattcaggaggccagttcgatgctgccggtcgcggccctgttcgccgatgataatcatccgcagcgggtcatggatatggcagcggcgcctggctccaaaaccacgcagatcgctgcccgcatggggaaccgcggcgccattctggccaacgaattttcggccagccgcgtcaaagttctgcacgctaatatcagccgatgtggaatcgccaataccgcactgacgcatttcgatggccgcgtatttggcgctgcgttaccggagatgtttgacgctatcctgctggatgcgccctgctctggcgaaggcgtagtacgtaaagatcctgatgcgctaaaaaactggtcgccagaaagcaatctggatatcgcggcgacacagcgggaactgctcgacagcgcttttcatgctttacgacccggcggcacgctggtctactccacctgcacgttaaatcgccaggaaaacgaagcggtctgcctctggctgaaagagacctacgccgacgccgttgaatttttgccgctgggtgatctgtttcctgacgctgaccgcgccctcaccccggaaggcttcctgcacgtcttcccgcaaatttacgactgcgaaggattcttcgtcgcacgtctgcgtaaaatgtcatcccttccagccatgcccgcgccggggtataaagtgggggcgtttccttttacccccctcaaaggccgcgaagcattacacgttacccaggcggccaacgccgtcggactgttatgggatgaaaatctccatctttggcagcgtgaaaaagaggtctggctgttcccggcagagattgaatcactgatcggaaaagtccgtttttcccggctcggcattaagctggccgaaagtcataataaaggctatcgctggcaacatgaggcgacgatagcccttgcctgcccgactcatgctcacgcgttcgaactttctgtgcaagaggcggaggagtggtatcgcggtcgggatatttatccgcaaacaccccctgccgctgatgatgtcctggtgacgttccagcatcagccacttggtctggcaaaacgtatcggcgccagaataaagaacagttacccgcgtgaactggtacgtgatggcaaactctttactggtaatagttaaaaggcgcacaaaaaaaccgcactttttgactggcgcttttgcctacgttgactacgctgaaaaatggacggctaaactggtcgtaccacaattagcgtattaacggagagcacgatgatgaaaaccagtgtgcgcattggcgcttttgaaatcgacgatgccgaattacatggcgaatcgccgggggagcgaacgttaacaatcccctgtaaatccgatccggatttatgtatgcaactggacgcctgggatgccgaaaccagcgttcccgccattctcaacggggaacattccgttttgttccgtactcattacgatcctaaatctgatgcctgggtcatgcgtcttgcctgactcaaaaagaacccgtcgccaggcgggttatttattcttccttttctcatttcccccctgcgctaacctctcctacactatcgtgtaaagtagttaacattgaggatgtaatgttcgcgctggtactttttgtatgttacctggatggaggatgcgaggatattgtcgtggacatctacgataccgagcagcattgtctttattcgatggacgatcaacggattcgccatggcggctgttttccggtagaggattttatcgacggcttctggcgacctgcgcagcaatatagcgatttttaaccctggtcgctgataccgctattgtatccgcgctaacgtcaattgcccgccaaataccgcgcccgtatcaatatagtgtacgttggcaaaatccatgcgccgacgcaacggcgtatggccaaaccaaaaatgatcggctccgctaatcccgccgcgcttatttatgagccgttcgcggctccagagaacctgatgtaagtcgacctttttttgccattgataggttgacgcgggataatctgcatgagcgatcacatgcgtgctatggcggcaacgaacttccagtatccagggcagccgctgacaaagaataaaaagcgcttcagcttgcgcagcgtgttcagccgtcaggcgggtaaaccagtcgccaccattcatcaaccacagcgtcgactgcgatgaggcccgcgcatccagcgccatttgttcatgattgccgcgaaccgccgtcatccaggactcacgcagtaaagccaggcagcccaggctgtccgggcctctatcaatgagatcgcccacagaaactaacaagtcttgttgcggatcaaatcgacactcacgtaaccttttcattaacattgaaaaacagccgtgaatatcgccaaccacccagacatgccgccaattctttgcctctattcgctgataaatctcttcaggccgcatcatgtttttcctgtcgttcattatccaggacagatataaaaagatagcgtgtgcagatttttttgcttagtaagcgtgcgctgttgtaaatagcgaatttcaccattagcgagtaaatgctttgttatcatcgcaataaaatataactggctgcgccaggggagggttatcccctggcgcagcgagctactcactatcgcctgttcaccttcaatactcttcctccttaaaaacatatcggaaacataaaccacatcgcctcagcacacgatatagcacactctttagcggagtgatcctcaaggcaaaccagcgccaatgcaggtgtcgttaccgtggcgaccatcgcccccacaaacaggcgcagcacaattttttttaaaggcggcataacctctcctgacagttaacagaccattaatccttatcgagacatcatccgtgcgcgggtatcatagacttaacaacacgcagcgttacaaaaaaagctgtctggttgtgcaggtatttagagtaataacaattattttaagttttaaggttatccatttgatttttatattaaaataaagatgacgacgttttgttaaaagcgtcgccataaaaacgaatatatagtttcagaaaatctgctattaattcatatggttaatagcagtattgtatttactaccatcaggaggcattctgaagatacttattcgcaatattttctatagttaactgaaattgttgtggcgttggcatcgtccccttattaaacagcggcgtaacctctttcataacgattttctcagcatacgctttaaaagatacctgctgattatgatttataaacatatgcggatatttaatactcgcggaagcaatgagggggacgacaaaaggattcgcccctgccccacctggagtaaatacgccattttttatctccccaggtagccccgcattctgcgcagcctctcctatctctttcaaaaagggggtaatactgacccctttactgatgagtaatttacaacattgatctttattattactgtacacggctgataatatggcttcgcatgtctgacgagcataggccggatctttactcgcattacctttgatatccagactattgagcttttgcagcataaaatctttaacagttttactggttaataccgccctaccctcagaagcgttcccacgatgaaaatgggtagtcggtatgtctgtttgttgatgcaggctaaaacgatctgacagactcgtcgacaggctgataaagctatttctaacggcagtaatactttttgcaaaaatgtccttctccgttgttttttcttttactggttcaacgtcacttctatggattctgtagtgctgggtggatagtgttatgttagtcacggtagttctccttttagataactatgcatagctacactttgtttatatttcttgctttcaaaaaatagccaccttctccacaaccatttttactcattgatatttataaattttattttcctgatggattttgttcttctgtcacttagcctgttttttttcggcgcaaggtgatcgacttttatcgaggaacatttttatcgggacaatcctgaacaggtaaaacatcacttcaattcaactactgcgtcacataaaacattcatgaatattattatttatgctgatgttgttacgattttgcccccattcgcaggctggctaccaattatcctgccagcgagttagccgctttttcaaaacctataaagtcgccacgccaaacctctccgtcactgtaatccttatctaaacatcaattaattaactgatttttatatattatgacttttcatgacgttcagaaaaactacaaatgaaatggattgacgcatctattagtggtcaaaaaaacgcgctacgagaaataatcagtaacaattgcaacactattccaatcataacgtaaactatatgataccaggtgattattattgcttttaggtaacatatctgtatggctgcttttaagcaacaatactctaacacaacatataacattataacttacaataggttaacaaatggaattacagcttatgcttaaccactttttcgagcgcgtcagaaaggatgcaaatttcaacgcatttctaatcgatctggaatataataatatcgcttattacatctattttgttgctaccggcaatgtgaaaattatcactcatgcaggccacttcatttctattaaaagcaatagaaagctgattaaagtcaattcaacaccgaatacgcaattaataaaattgatttcagctaaacacttttcgggggagcattcctatgaaaaatactgtactgatctggcaacggcaggcgtttttaaatggattgttgaattaaaccaaaaaactcgacaatactggtcgaaagacaaccaattattatatatagaaaatgtggtcatgccgctttaacaagccagggtaataatagcgtcagtcgtgacatccggcgtgttacgactgcgggttatccaatttagagaccataatgagagtctgactgcgagagttaccctgtgcagtccgaccgacgcagcaacgtttgacacgattctcgacaacagcatctcctggtgcaggagaaatgatattcaaagcgatatcgactaaaagctcaaaatatttgccttctatttatattctatctaattaataccctccaggaagtgtggcataattgcagaatctgtcaggattccgggagcataccggagcgtaatcgaaaaaacatctggagatgtatgagcaaggatgaaatcagttatcaaattctttaccggtactctctggaaaagctatacagtactcttgccagaagagtagataacgtgctgtcattcgccctcgtttttctcggggtcggcgtcaccataaacgtcgggagtccctttattctggggccaggcattgtgggtatcgccatactaaaaagagtactccgcttcggcacgcgatcagcacaggccgaccggcagtcccgcgcctggctgaaactttttaatactcagcaccgctttccttcagataaaacactgttccttgccttcacatcgcttgagcaagacgcgagtgaagtatggtccatgcttattggtcctgccatcgtcatgactgagaccgccctcggaaaaacgcccattgagccattgacggcgggtgaaaaactctgtgcatttttgagcggcgcgacgaaatcccagctagcagatcgcaattgaactgtcttctaaacgcctgcgccataccacagagatttagtataaaattaattaatggagtactaacgctgtcagcaggtttctctgagtgaaagattcgtattatacgcacagcccagtttacagtttatataacagcgctatatgtttttgtatccgtaccatgccgcctacaagcggctgtctgagtacctctagccgtgccagggggtattagctcaaatgtgagctgacatatctatggcacagcgccaaacctaatctgactgtccgccctgtgccagaagcggacgctgatcatggtgtgtacaggccaacaatacgatatattttaaagctacctgattacagctttcataaagctatgggtattcaaatgcagcaaagctataaaccgggcttaattaaataatgcctttgcgaacctactttaggaaagtccggtagcgacatttgaagtatatacccctgtttttcataaaaagggagagcctggaagctaaaggtatctacaagtccatgaacacagcctttccgcaaaccttctttttcggccatcgccataagtttgctccccagaccgcagttccttgcagattcacttacccaaagatagtcgatgcagagccacggaccttttctgtcagcaattaatccgcctaccatttcgccgctttcgtttctgcagtagaccccaagctgcccatttttactaaaatcgacgaactgagcattgtagcttcttaatccggttaatagttcttctttatcaaattcagtaacttgatgtgtgatttgaatgtccatacatgcccaattgaacaagtttgtatttggaatataacgttataaataagttaattaaatgtatcaatagaaagtttgtttttactcctgggggcaggtcacgtccgctactcgcttaaagcaaactgtcagttggagtctgagctggtacaattaatgtgccactggttagaaatcagtaatacgattttatcaggctggtgctctggcctgtcaggatttgaggtatccacccggtttaccagccccctgtatttggcaccagtggaacccacttcccgatccaggatatccagtacccaccaccgaacctctttccccaaaagacatgagcaacctcaagcgccttgtctggatgataaccacggtatgaagtttgataacacgtggaatcagggcgtatggttcgctctccgttcagcaactggacgcccttctccccagcctttcagcgttgaagatttgccagcgctgggtgaagagtataggcgaattatgaaaatcatttctgccgtttatacttcgaaaaagacgttatcaaaaaggtggttcgcaagcgcggagttattaaacctttacttaacgaaatacggtttaagttgcttgaattgcagcagaaagaaaacgacggcttgctgatgctggacaaattaagcaagcatggcatcaatggactgatacgccgtcaataaaaggaagggtgcatggacgatcccgtcacatcaccaatcacaacagaagagcacaaaacaacatttcacagtgtaaaggataaaacacgatgccattttcaatcaaaaacatatgttcaggtccaaaaggacattgcccagaaatctccagccctatacaggacaagccagtaccgaggaattgcacactgacctcaacaacatgcgatatacagagctatacagtattcagcagatggtcctgcagttatgaaatgcgcccacccggtgcagaagaaagaaccccacgactaaaattctcagcaacggagctctcatggctatctaaaacaatagaaacagagaggcgcaacacaaaagaatgagcctgtcagtaattctgtgtaactgcccagttattaaaggtgatcgctcaggcggtcaccgaactcgataataaaacggctcatcgccagccgccagttctggatcggcatactccattttttgacgcatccttgatcgccagataaataacttttcgtactgagtcatccgtcgggaacaccttgcgtttcttaatcgcggcacggatcacgcagttcagggattagattgcgtttgtggtgtagatggccttgcggatatccggcggataactgaagagcgtattgaggttttcccagtgcgcacgccagcttttgctgatttgcggatatttatcgtcccgggctttcgcgaacgcatccatcgccatcagtgccgcctcttcggtcggagcctgaggccgctggtggcgactttgtagcctttccaggctacgtatttcagactgttacgcaccatatggataatgcacagctggatatggggctgcgggaagacgctgtttatcgcatccgggaaacccttcagaccatccacacaggcaatcaggatgtcctgaacgccccgggttttcagctccgtcagcacgcttagccagaacttttcgccttcattttcggccagccacatacccagtaactctttctggccttcggtgttgatacccagtgccaggaagacggctttgttgattacgctgccattctgacggactttgacgacaatgcagtccatataaacaatggggtacagcgcatccggttgccggttttgcctctcagtgacctgctcttttacggcgtcggtgactttagatatcagcgagggtgacacattggcgtcgtacatctctttgaaggtggcgacgatttcgcgggtagtcatgcctttggcgtagagggataaaatttggctgtccatctgcgtaatgcgcgtctggtgcttcttaagcagctgtggttcgaaggtgttttcacggtcacgcggtgtgttgagttctatctcgccgtcatcgcacaacaccgttttggacgagtagccattacgggtgtttgagcctgttttgggcgcatttttctcatacccggggtggtcagccagctccgcattgagcaccgtttcgacggttaatttcgccagcatacgggaaaacgaattgaggtcggcttcggttttaaggcctttagccagttcaaccgcaagggctttgagtttcttttcgtccataattgcctgtctccgttactggagtgaacatatcaaagacaggcaattacacaattttacttacagtctcagttcagtcacattattgatgagcgactgtacgttaagcaaatcaagaccgggatgaaaatcgctctgccactttcgctcaaccttccttccatgggtttacgcctcagtacggtgattgagcgttgccgcctggtaagccgtagcgaataccttatcagcgctggcatacgcaaaaacagcccgaacgggagtattcatcctaatagcctgactaaaaaatttgttgcggcacgaaaattgaccggaataaatttcagtgaaaacccaccgccgtttcacgagatccgcagcttatccggacgactgtataaagacgcttacggcgaagggtttgctcagaaactcctgggacatacttcagagaacaccacgaaactctatctcgatgaacgcgataataaagcttacgtgatgctctgattttgctgtaaaagaaatgttaaactggatttggatctgatataacgaaaaagcccggaatacagaaattctggaaaatttcggaaatttcggaaatttcggattattgatcataagcaactgatttataagaaaaaaagagaccgaatacgattcccgcttacggcaaccattgatatttctctttaaattcataatgttacatattaattaagtgattttaacgattggaatatgttatttttgattctaatagattcaattagttatcactttttacgttttaattcggacatatttcgggccattttgcgtataaatcccccgaccaaacaaattaactgcccaatacatcactcccctcttccattgggggactcccgatgccaaatacccatgtagacgaaggcttaatagtgatgccaacaaaagcgatcgcgaaaagttgaacaggtggctagtttcagattaaacacattggttagtcatcttgaacaagtaaaatccgccgcaactggcaaccattcaatactcgcactatcgaacgatcgccagcttgccgcagcccgttcttgcatacgatgtggctgcggttccatcacatcaggaatgtgaaaatcgggataaacctgccacttaacctgaagcaggtcttcatagcgggtggtataccgaggcgaaagcatttctcttaaggtcgccatataaaaacattctattacaacgagttatctcctcctgcctccgccccggcgcaaagctatagttttttctatctccttgtgaaacaaacaattattcttgctatggcgctgattaacaatcgttcgcgggcaacgtacattcagcgagtttcagagcttcctgacggaattcagccggtgctgtttctggggcttcttactggttgatacagatcctgcctcttacttgagaatttactcatttagccgtatgtccattatgggtggataagatcatttatcatcgtaagggttgaaagcgataagttaaacttgtcctggctcaacaagggacccgactaatgatgagctcttcatcttcaaggcgttttatgccttccagcaagaatagacattaaatcgacaactgctgccaggtcttacaggcgcagtggacaatcgtgtggtaacagcctgagtcatttattatttttctcattcagcataactgcgtcttctgatagagaaatttttatctaaacatataaaaaacacagtgaagaaaacgctacttttttctagctaaaaagctaaattaatttttttacggagaggatcttatgcgcaaggtgtcgatatctatattattcatgctagtttcactgacttgggggactacatggttggccatgcgaattgccgttgaaactatccctccagtgtttgcaaccggaatgaggtttatgtttgcagcaccttttttaatcatcattgcatggttaagaaaaaaaacactgttgtttcctcccggacaacgattattccagtttgtgatatgcatcttttatttttgcattcctttctcactaatgatttatggtgaaacctatgtcaactctgggcttgccgccattatctttgcgaatatgcctgtggccgttttgatagcatcggttttgtttctaaatgaaaaagcgaaactaatgcagatcgcgggcttaactatcgcaatcactgcattgacggggatacttcttgaagaaacgaatacaagtacagagagtcactggcagggtatcactgcgcttatttctgctgtgttaatccatgccataatatatacacaatgtaagaaaagaagttgtactgtctctgttatcacatttaatgcgctcccgtgccttttagctgggttgatactttctgcgacaggatggttttttgaaagaccacaagtatcaaccttctcagtacactcaatattagctaccctgtatctcggggcttttgccggagtttttggtatcctgtgctactttgcgcttcagcaaaaggctaatgccttccaggcttcgcttgtatttcttatctttccgctgattgcggtaagtctggaagactatatttatggatatgctatttcaacacactcaatgctgcttattataccattagttatcgggatatttcttactcttgtcgccagaaatctccctgtaaccagcagatgccgggataactcatcacagaaataatcgatttataataacgcaaataattcctgatgccttactgagctccggctaatgcggggtggataagctggaatacagacccggtaatacacagcgattatattaacaagcaatgtaataaaggagttttttatgttcatgtttctgccattcttgcttgcactgagcgtggcaatgggggccataaacagaaaggataaagtcagctacattctgtgggccgttttactcatcgtcactattttatcattcattcatcatatgaccaattcgctgactttgtcattttaaggagtgtgtatgaaaacgcatcatcatccaacaacatttgttcatctgattaatcaggtgggactccttgggatatgcgttgctctggttgtagccttttattatcaactcgtcaggcatgagctgccttgtccaatttgcttattacagcgggctggcctcatcatcgccggttttggctttttatttaacctctgctttggtctacgaggtatacattacgggatggtaattattggcagtatcctgaccggagttatggcatcccggcaaatatgtttgcatatcatgcccggtgacacaggatatggttctgcattttttggattacacttttatacctggactctgattacgtcaattctgattattattgctgttgcggtaattctggcaatcagtagcatgaatgttgcatttcgttcattgaatattaatccggacctgttcagtattgtcggttgggtatttctgttactgattactgccaaccttatttcaactgtactggaatgtggcggaggggaatgtgctgctaacccggtcacatataagctactgtcgaaacaggatattgcctttctgaaaacaggcctcctgacgaggacagttctccggttatgacgcacttttaaaatgactgattggtaaatatatagcaagcacctgtcttgtagaaattggaatggttatgggctaacacggaagttacagtaacattgaaatgttgcaataacaggaatcaaacttacaaccttcgcattacgaattagtagaatcacatttaactaactgtttcaaatacacatttccgcattcacattgctcaactcaatggcacatgatgttagaaatagaatgatgcttcaccatgtttgacacaaaaatggcacaccctataaagcatccacagcacatatttgggtggcacgcaccgtggaaatactgcattaccctaacacagggaattttctgtacagcgtcgacagccccgcatcataaataatcgctacctgctgtcgcggtactcctgccctaataaggcaccctgcctgcgcccattgctccggcgtcagttttggcctacggccaccaatgtagtggcactgtagtggcacactgggtactgaagcaatggccacaactggcgcttgatgctatcagccagataaccttccagatggataacaaacatagcagctatcctgtctgtatcggaattgtaaaaccagacgttgaccatcttcatcaaggttaaaggaacaaagagctctttaaagtaactctttgttccattacgatagtttaaatatgatgttctgaatgggccttcactacatgaacaggaaaggctcaggataaccacttctcagacattaaaagcaaatgagaaaaccaagggggcctaaacctgccgccagggaacaaacctttgcacagtctgcagtgctaccaccgtcccctatgcaccccagggcgaacgctggctaggcagcagacgacaacagcagaagagttgttatgaataaaactttacgtgatttaataagagaaaacatattattaccctcatagtaagcagtattaaataagccgggatatatctgatgttcaatcagtccctcatatagggttagcaccatagcgagtcgttttcacaaaaaacacagactgttgaaactttatttatcactttgacatttgcaatacatgacacatgattagcttcagccgccattatagggaaagctccatttccatactcatttactcacttctccctgcggaaaaagaaatgcagtatagccagcgtggtgcttttgctgaaaccaggcgcgagcaacacggcaatgatgatcggcgtcagaatgagttcggaatcggcattggcaaacaaggcgcacagtcgttaatacccaccagcagttccgccaagagtgcgacaatgtcgtaagagaggccttcagccaggcaaaacagcgctacggtgcgccccggcttgctgaggaagtgaacctggggcctgaggtacaatgtaaaaacgatagcgtccagcctgtgccatcagggtctgcggcgatctcagtccggaacaatttgaaaaccagaacctcgcttaaggctgtgtccacaatacgcggacaggatcaaaactgttagtgtggctggcttacaagaatgaagtgaagttgattgatataacaaacactcctgataatgttaactggcctgttcctccgggggagcgagccagccatgatttgaaaagcacatgaaatcactttcacatgaattaatttacattggaaataaaatataatagtgcttatcatttttatttaagttaaatattttataaatggtttttatttactcacctgatggtaatgaataacgtttaatatctatagtaaaggatgctgtaaccgtaaggatagtgtgccacaatttaacaggtaacatattatgaaacacgtcaagagcgtatttttagcaatggttttaatattaccatcttcactatatcctgctcttacaatagcggcagactctcaagatcataaaaaagaagaaacaattaagccaatgcctcaaaagtggtgtaatctttggcctgctggcatacccttccctgaagattggtttaaaatgtgtagaggttattgagtataaatttaatatactagccagtaaccatatcagttatgacagacaggccttcttcatatttgctataaataaggcctgagctttcctgacaaattataaactactggctggtttctccggccagacaggctttaaagtatcaacacggtttacctgtacccggtactttctccatgccagaagagaagctttttctttattggttgcttcgtccagatccactgcatcctgtaacggcgcgattttttcagacgctatttgcaggagtctgtttttcgttccttcagcttcacgaagtctggctgcggcctccgcagcttcatcattcatccagacctgagccttactatcccattttttgtatccaccacctggtgaaactgatgtgacgttttcaggtagcggaccaagatcggagatataaacctgattgccggttgttgtgtcgtaaaccgtctcgccgcggtgatcctcctgcagactccacgtttgggtttcagcgtcaaaaacagcaatatgactggagggaatatcaggaggggctatatcagtacaatttgccgggcgacgctgtccgggggggacctgaccacatccggcccccattgcaggtaatgcaacagatgtaattttccggtcttctccggcgcttttattgtgctgaaaaattgccagtaacgcagcccgtgttgcattataaaccgcgtcggtgccgtcaataatcagcggaacgcgcatcgtcggggcgggaaccagccacggatgtttactgttacccgtttcaataacaaaggcggtgccgacgggctgttcccccaggtattcacggatgatattttgctgtacccgttcctgtaattgcgacccgaaatatgccgtaatagcagcatccacaccgccgtccataagaccaaaggtttccgcattaccgtctgcgtccacaataacgacgtgtccgtgtggaccgatatacatggtgtgctcgtgtcctccgatataaactgtatgcgcatggtcgccagcggcctgtgtccacgcaccacctcctagctgaaatgaagtgtgattggaatctccccagtatgaattgatataaccgccgaactggttagtatgattgcccgtggtattaacgccccttttcggagtcaaaccagttcttacgctcttttggagtcattttattcgggtcctgatgttcagcagcctgggaaacgggcgtttccatcagtacgcggatcacatccgtcaggagatacagcttgtttttttcattgcttcccagtgccaggggaacgcccgagaggcgactgacaaccgtctgtcgatgtaaccctgtaatagcggcaagctgactgatattgcatttgaggttcttcagttcgccgtccatttttacctctggggctgtttcttagcgcgccctcccccggaaaaacaaaatataatgaacaaaaaacatacaaaccatcatcttttaaaaataaattacattaaaacagagagttacaacatgatgatgatgcatgaaaaatcaaaaatgcgccaaatcccgcgccgctgccgccccgtggcaggccgccccgccgggagtacctttttaaaatgcgaacaattatcaacaactaccacttaatgattatttatttcattttgcgatattgattatcattttcaataacaacacacagagaacataaatgaaaaatatcatcactattatcgtagccattattatcgttttttatgcaggtatgtggtcgcagaaattcctgatggaagatgagtgccttgattcaggtggttcatacaatgaaaatggaatttgcaatattgcaggcagtcatcaggatgttccccctaagtaagcagaatgctttttaaattcgttacccacctctacagataaggaggcgaatggtcactaaaagtaaaatccattgcagaagaatttccggaaagttgttattccagcaccccgacaggttattcagacagatttcagctatatcaaaactgagtgagtacttatcagtttcatctggtgaaaaacctgttcttattcatctggttccatctgatgatatgtagtcacttttttacagcaatattacagggggagtttcaatgcctcctgtaattatttgactctctcaccgaatcatatactcgttcacacgtcattcctgcccggtagcgctcgtcagcgattccagcataatgtttagctgcttctgcaatatctccgagcatgttggcaagcattctggcgtcggcgttggttgttttgcttctgacggcagcggcaagatttgcggtgtgctttgcggcgtccaggcgggtggcaagtttttttgcttcggtacgcagctggctaacagtggcagacaggccagcagcagtggcagcagatttagcggcttgcgcttgtgcatctttcacagcctcatcacgggcaataacgcggccctgttcaataatacgggcggcggtctgggcgttgacttcctgagaggattcagcgctgtcgcgatctgcccattttttttgccagcccctgtcactccagacattaccggcgataaacgcaccagccatcagcaaaataaacaccagctgcaaccagtatcttttcagaagagcagataacagattcataccagcaccgattttgctttctcaaagcgctcccgccgatcaccgatgccgttctaccctccgttgatgatctgcgtaacacgtaccaggtcgccggaatatttcagacaccctttagtcacaaaaagccacgctgcggatcgggcggcatgacgttctagctcaagctgtcctggattcgccactagatccagtttcagtgcaacgccacatctggtgtaattctccagcccggtaatcctgatcttcgccgaacgtggtgcgaaagctttcttgccgttcatggcgttcgcgatccggactggtacgaatatgtgcctgataacaccccaacaacccatgaagaaaatgcagcaaggcttagtcaggcgggcaaatgtctgcgggatattgaggcagggagatttcagtgtgatgaagaaaaacagcaaccgacaggcgaactggcagatgaaccagcaacgcctgaagcagtggaacaggacacaactgaacatcatccggacccacagccgctggagaatgaaccacctgtaagccagacagaagcaggctaccagaaaatacgggcagaactgcacgaagcacgtaaaaacattccacccaaaaacccggttgatgttggtaaacaactggcagccgcgcgcggtgaatatgtcgaagacatcagcgacccgaacgatccgaggtgggttcataacaattacagcgcctcaaatcagggtgaaaaagaagaagtggtgccggagggaaaacaaccagcagcagagccggaggctgtcaccagaaacgcggacgggactttcgatgtatcagcgctattcctgcccccctcaaaccagaccgaaaaaacggaagccagaacagaaagagatggagaaacgccgaaagagagcaaccagcaggaaacggctggcgatacaggacaggaaattacaacggacggtggatcaggtacaacttcatagcgcaaaaccacacgccagtggcgcttattgaaaaactaaaaggaacggactcattcactgtgtccgcatggattgatcgctatgaggttttattacagcgccggaatctgtcggttaatacctacaagattcgcagtaatcaattagcgaccgtacgcgaaaaaatgggagaaataatactggcagaagtaacaacccggcacattgccaagtttcttgagtcgtggataaccgagggaaaaaacactatggcgggagcaatgagatcagttctatctgacatgttcagagaggctattgtcgaagggcatattgtgaaaaacccggtggaagcaacccggataccagagattaaggtggccagggaacgcctgcaactggaaacgtataacgccacacgagcggcagcagagcatatgcctgcatggttccctctcgcgatggatttagcgctcgttactggtcaacgtagggaggatatcgtaaatatgaaatttagtgatgtttttgacaaccgcttatacgtcactcagattaaaaccggaatgaaaatagccattcccctctccctgacacttcgggcgacggggttacgtctgggaacggtaatcgatcgctgccgacttgtaagccgcactgatttcatgatcagtgccggaatcaggaaaaatagcccgaccgggaatattcatccggatggattgacaaagacatttgtaaaagcaagaaaagcctccggtgttaacttcagcaataatccaccgacatttcacgagatccgaagtctggccgggcggctgtacaaaaacgagcacggcgaggtgttcgcccaaaaactcctgggccacacatcagagaacaccacgaaactctatctcgatgaacgcgataataaagcttacgtgatgctctgattttgttgtaaaagaaatgttaaactggatttggatgtgatataaccaaaaagaccggaatacagaaattcgaggaaatttcgaggaatttcgaggggaaacacataacccattgatttataatctaaataaaaagagaccgaatacgattcctgtattcggtccagggaaatggctcttgggagagagccgtgcgctaaaagttggcattaatgcaggctaaatcgccttgccctttaagaatagatgacgacgccaggttttccagtttgcgacgaaggtgattgaaaaaacctggcgttttgtctgttatcagagataaaaaaaccgtaagccttttcgtgaaggtttacggttttttattaaaaatcagtcagctattggatggatcacaaagcttttgcgcacgttcgataaacggcgccagactcattttctcaccgggcttcgccgggttatcgatttgaatgacggcaataggctgagcgcgcgttttaccctccgctacttgctgttcggcaatggcattcaagggatactgcaccagcgtactggggttgatcacatagagcgcctggccaggccgacaggtcaacatgacctcttcccgattaaacgcccacttgtcttttcctacttcaaaacgacttacggtaatcacctgcggcgccgccaacgctacgcccgaagtggccagcagaagcgccggaaggagtatttttttcattcgttatgccagtccatcaaaaaggttcgagggttgcaaacaggctgacgatcgccagaactatgcctccaactccccattcaatttgcgtcatcctgacaaaccataggtcagtccggggattttcctgtcgcatacgtggtacgagaacataccgattcgtcagcgcaattgctaccataagcacgaccagcgcacattttaacaaaagcaactgtccataggtggtctgccagatagcggtaaatcccgtgataaatagcgtgttgccaatgcctgtgagcaatacgcccgccacaaaaaagtgaccataacgagaaaaacgcatcatggcgctaatagcatgttgacgccagcgtccctgagccatgcgcatacaataaaccactggcaacagcccgccaaaccaggctgcggcacagagtaaatgcagagcatggttaatctgctgtaatgttcccgctacaccgtcgcgcatcgtcgcatgtccaacgcctgccagcaggataaactgagcaacggttagaataagaagccgtcgttgcatttttaccggcgcaatgactaccaccgccagcgtgaccagcgcgaggataatttgccatatccagaccgcgccaaagcgggtttgcagtaccgcgccccacaccgagacgaaaaaaacatcgggccagccgccgcccatcagtccgccctgaaccgccagcatgaaagccgcgctgataacgctccaggcggcggcatgttgttgcagatgtaaaaatcgacgcgtcattaaacgacgaattgatgcgggtgccagccaggcaccgtaaagcgcgcagccgtagaccagcatcacactagcaaaatgaataaatcggagagttatccagacgaatgtcagcatcatttatttcacgctgaaggtgtatttcccttttgttttatgtccatccaccgacacaacgtgccagtctaccgtgtaagcgccagattttaacggctgctcaagcgggataatcaactgcgttttatcctgttcatttcgctttgccgggcgcgttttgatgagctcttgctgagggccagtaatggttgcgccgctgaaccctggctcaatcccttcagaaaagttcagggtcagcgcctgtggcgaggccgtaacggcagcattcgccgctggatactgatgcgtcaggtgcgcatgtgcccaggccgctggcgtcgcaaatgtcgatgccagcagcagtaaagctaaacgtcgcgatggtgcagaagaagccatattcactattcctttttgttatacctacgttacaaagaataaccttcaacaatcaatgagtcgaggatcatcatttccatcttgccattaccgcggactcttagtaccttctggcggcaacaaaaaaggagacacgtatgaaaacaaatctggctcagcttgaacaagcggaaatggataaagtcaatgtggacctggcggcagccggggtggcatttaaagagcgctacaatatgccagttgtcgcggaggcggtcgaacgtgagcagccagagcatctacgcgcctggtttcgcgagcggctgattgcccatcgtctggcttccgtatcactatcccgactcccttacgaacccaaagttaaataaaaattatataacgttacacttccttacatgcagacgactacattataaggcgattcttaacctatgctttttagaatggctgtagagactatgaaaaggaagtcattatgtcctcctggaaaattgctgctgcgcagtatgcgcccctgaacgcctcgccggcggagcatgtcgcccatcatctggaatatattgagcttgcggctcgtcaacagtgcgaactgctggtctttccgtcactgtcgctattaggctgcgacgaaaggaataaatcgttgcccgccccgcctgacgaggcgcttttacagccgctcactcatgcggccgatacccaccatatgactatcattgtgggtatgcctgttgagcataactgccgcttcgtaaaaggcatcgctatttttgccccatggctaacgtcgccgctcatgtttcacaaaagtcatggcgcctgtattgccaggcagcgaagcgctatcaacgtggtggatgagcagccagaaggtggtgatatagatccctcatttacgttattcacaaccagtcaatgtcttaacgaacctgaactccatgcttctacctcacgcttacaacgtttttcgcataaatatgcgctggccgtactgatggccaatgcctgtggaagtagcgctctgtggaatgaaagcgggcaacttattgttcgtgccgattgcggttcgctattactgacgggcctgcgcacaacggagggttggcaaggcgatatcattccattacgctaaggtctttcggtgaggaatgaatcatgttgcggattatagacacggaaacctgcgggctgcagggcgggatcgtagagatagcctctgttgatgtcattgatggcaacattgtcaatcccatgagtcacctgatacgccccgatcgccctattacgccgcaggcgatggcgatacaccgtattaccgaagccatggtcgccgataagccgtggattgaagatgtcataccgctttattacggtagtgagtggtatgtcgctcacaatgccagtttcgacagacgcgtattacctgaattgccgggtgagtggatctgtaccatgaagttgtcgcgacgcctgtggccgggaataaaatacagcaatatggcgctctataaatcgcgcaaactaagcgtacaaacgccgccggggctgcaccatcaccgggcgctttatgattgctatatcaccgccgccttgctgattgatattatgcgaaccaccggctggaccgcggaagagatggtcaatattacgggccgtcctgcgctgttaaccactttcccgttcggtaaataccgcggtaaggcggtatctgaagtcgcaaaacgcgatccgggctatttacgctggctttttaataaccttgataatatgagcccggagcttcgcctgacgcttaaacactacctggaagatgttcaggctggcgagcaacgcagcaatggaacaccacaataacccgcgacgctcacaagccgttgcgggcgcgcgtctatgcgctatgtaaggttccctgcgccaggccgattaaaaaggcgaactccagcgcgacgccttcgtaggatttaaaccgccccgacttaccaccgtgcccggagtccatatccgtacataacagcagcagacgttggtccgtttttagctcgcgtaattttgccacccacttcgccggttcccagtattgcacctgggagtcgtgcaatcctgtcgtcaccagcaggtgcggatagtcctgcgctttgacattgtcataaggactatagcttttcatatagtcataatactcaatatcctgcgggttcccccactcttcaaactctcctgtcgttagtgggatcgactcatccagcatcgtggttaatacatcaacaaagggtacctgggcaataacgccgtggaaaagctcggggcgttcgttgatagcgacgcccattagcattccgcccgcgctcccgcccatcccataacacagcgacggcgaaccgtaacccagttttaataaggcatcgcaggcatcaagatagtcattaaaagtattccgctttttgaggaacttgccatcttcataccactgctgccccagctcaccgccgccgcgaacgtgtacgattgcgtaaacaaagccacgatccagcaagctcagtcggctgctgctgaagtcggcgtcaatactggaaccgtaagatccgtaaccgtaaaccagaagcggattttgccctttacgaaaatacttctgatgataaaccagcgataccggcacttcgacgccgtcgcgtgcggtgatccacaggtgttcgctctgataacagccagaatcaaacccaggcacttccgtctgtttaagtacccgtcgttctccggtatccatatccagttcaaacaaggtatctggcgtcgtcattgaagaatagccgtaacgcagccgggaggtctcaggttcgggattataggcaagccacgtcacgtaagccggatcgtcaaaggcgatgcctatcacttcacgggttttacggttaatttgccgcaggctggtaagcccccgttgacgctcttcgaccactaaccagtcggtaaacagggtaaacccttccagcataatatgctcgcgcggagggatcagctcttcccaggcgttttcattgcgcacgcgggtacggtacaacccaaagtttttaccgttccggttagaacgcaggtaaaacttatgttgatagtgatcgagactatattcatggtctttgcggcgcggtaaaaatgaaaacggctcggcatcggccagttccgcgtcaagtaatagcacttcgctagtggtggcgctggcaaggtgaatcaccacataatgctgcgaagtggttttatgcaggctgacataaaaggtatcgtctttctcctcatataccagttcatcttgcgatgacggagtgccaatcgtgtgccgccaaacctgatagggcagcagcgtcttcttatgcttacgcacatagtaaagggtcagggaatcattggcccagacaaattcaggcgcaacgttatccagcagttccggataccagttaccgctttcgaggttacgaaaacgcaacccatactgacgacgggataaataatcttctgccagcgccatgatggtattatccggcgtaatggcaagtccaccgagcgtataaaattcgctgtgcgcggcccgctggttcgcatcgagcaaggtttcccacacatcccactcttcgcttaacgccgattgtcgttgatagatggcatattcgcagccgggttcatagatataacggtagcgatagccatttttcacatacggagcggaaacttctctgggcgggatgcgatcgataatttcttttagaatgcggtcctgtaacgcctgctgagaggtcatgaccttccggccatactcattttcctgatgcaggtaatcaaggacttccggctgcgagcgagtgtcatctcgcagccagtaataattatcaatgcgcgtatcgccatgtacggtcatggcatagggaattcgattggcttttggcaacatgtcgttttttcttttgcgttaatatttgttatatatcacgcggcaaacacagcggcgtagcatggtagtcccggtcgctcacctcggtaagcgcctgagatgtcactgcttcgccgctatcttgcaacatgaatgacgtaaactatccatcctataagggtggcaaaagacacgcatgatgcaagcgaaacatgttacttaatggcaggttatcagcctggtagcgcctgtttttgctgctgcaagtcctgctcgataccgtcccgaacctcctgaggaatttttagcgcgtctcctaacgcattcagatagctacgttccataaagtggtcaatatcaatggcggcgcagctcaggaagtagatttccagggcttcttcttcattgcgaatgccctgtgccagacgttgtggatcaagcggctgctcaatagctttttcgataaacacacgcccttgctcttcaacacctgattctcgcagttggtgctcaatcgccgcgcgttctttggcatcaatatgcccatcgctttttgcagcaaaaaccagcgccaggatcagtcgctcagtgcgaacatccagcggcgtactttggctgccgaattgcggctccccctgatgcgcggcgcgtactttatctttgtacttattccacaatacggaacccgccaccgcgccgccgcccaccagcaaagcgccagtaccgtatttggttaataatttgcgcgaagacttattggcgaccaacagtccagccagaccgcccagcgcgccgggaaccagcagtttatttaacccctgttcaccggaaggcgatgcggaagcgcctttttgcccaagaagtgattgtaattggttcaaccagttagccatagtacccctcaaatacagaccaataatggtcaagcgtacctgaggggatgtcaggaattgtctgttccggcaaaagaagcgcaaattacgctgctagcggggcttatattccgccttgccggctttgcaatcaacgatgacctgataatgaatatcggcgcttttaccgcgaacagttagcggaactgtccatttatcattttgacccacaacgtcctgcacattaacccacgcgaccgggtcagcctgcccgacctttttttggtcgtcggcccaccgcacgatacgattttgctggtagtcgcgcttcacgcttgccgcaatcccggcggcatccagcccttcgcactgcggaaacttaaccgatttactctcggtggatgccgcaaatgccgatacgctggcggataaaaacagcaggctcaacaacgctcctcttttattcatacttttctccttagcacaatgattcaggaaaagcatggtacaaaacgccgggagcgcaagtgtgggttcaggcggcttgctttttcgttttactcgcggcgtccttttcaaccgcctgcggagaaggcaacttaccggttttgaggatagtgcttaacacctctttatgttccgccagccacagcgacaacgcttcgcgctgcccatcttccagcacgactggcgactgctcaagccaggtatcaagaagatcggcagtatcgagcattttgtcccaggcgtcggcttcctttttactggtaaatgacatcttctcctcaccctcgcgaatgactacgtatttaacttcaaccgccattttgcagccccttatttacctgtgtttatatacagtatattgcaaggcagcaagaaaagcaatttattcgaaaagacatacgcaaacgttttcgtatatactgcgcgcaggtaaataaggggacagaaatatgacgctattaggcactgcgctgcgtccggcagcaacgcgagtgatgttattaggggcaggagaattaggaaaagaggtggcgattgaatgccaacgcctggggatcgaggttatcgccgtcgatcgctatcctgatgctcccgccatgcatgtggctcaccgttcacacgtcattaatatgctggacggcgaggcgctacgtcatgtgattacagaggaaaaaccgcattatatcgtgccggaaatagaagcgatcgccaccgatacgctgcgcgagctggagggcgaagggctgaatgtcgtgccttgcgcccgtgcaacgcagctcacgatgaaccgcgaagggatccgtcgcctggccgcagaagaattaggactgccgacatcgacgtatcgctttgccgacagtgaggccagttttcatgatgcggtagccgcagtgggttttccttgcatcgtcaaaccggtcatgagctcttccggcaaaggccagagctttatccgctcggccgaacagctcgcgcaggcatgggagtatgctcaacagggcggacgcgctggcgcgggtcgcgtgattgtggaaggcgtggttaaatttgattttgaaattacgctgctcaccgttagcgccgtcgatggcgtgcatttctgcgcgccggtcggtcatcgtcagcaagatggtgactatcgcgaatcctggcagccacagcagatgagcgaactggcgctgaagcgggcgcaagagattgctcgtcatgtggtactggcgttaggcggtcatggcctgttcggcgttgaactcttcgtctgtggcgatgaagtcattttcagcgaagtctcccctcgcccgcacgataccggaatggtcacgttgatttctcaggatctctctgagtttgcgctgcatgtgcgcgcctttctgggaatgcccgtaggcgctattcgccagtatggtcccgctgcctcggccgtgattctgccgcagcttaccagtcaaaatgtgacgtttgataatgtacacgcggcggtaggagccggagtgcaggtacggctgtttggtaagcctgagatcgacggcacccgtcgtcttggtgtagcgttagcgacaggtgaaaacgttgaagaagcggtgataagagcgaaaaaggccgtcagccgcgtgacggtaaaaggctaatgcgccatcgcctgatggcgacgttagcgcatttttatcagacctgcctgatcgccactcgtaagcccgataagcaagcgccatcgggcatttaacggcttactgcttcgcgccttctaccgcttcgcgcgccagtttggtgatgcgatcgtaatcacccgcttccagcgcgtcggccggcaccagccaggaaccgccgatgcacaacacgcttttcagcgccagatagtcacgatagtttgccggagagatgccgccagttgggcagaaacgtacctgagagaacggaccggcaatcgcctgcaacgctttagtgccgccattcgcttccgccgggaagaatttgaactctttcagaccatagtccatgcccaacatcagttcagaaacggtgctaataccgggaatcaatgggatagtgcctgccgtcgcggctttcagcagtggctcagtcagtcccgggctaatcgcaaattgcgcgcccgcttccgtcacctccgccaactgctgcggattgagaacggttccggcgccgacaatcgcttccggcacttctttagcgatagcgcgaatagcatccatcgcgcaggccgtacgtaaagtcacttccagaacgcgaacgcccccggccaccagcgctttagccatcggcaccgcgtgctccagtttattgactacaatgaccgggacaaccgggccggtggtcaggattgcttctgcacttgttttccagtttttcatcggaattcttctctcgcctgattactagtgtgtcatcttaaaaagtgatacaggttgcgccctgctccgcacccgacagcttttcgcgcagcgcgccaaacaactcacgccccgttccgacgcgcgacgcgctcaggtccggaatatgaggctgacgagcggcaagttccgcctcgtcgaccagcagagttaactcacctgtctgcccattcacgcgaatgatgtcgccatcgcgcacttttgccagtaagccgccatcgtaggcttccggcgttacgtggatagctgaaggcactttacccgaagcgcctgaaagtcgtccatcagtaactaacgcgattttgaaacggcggtccaataatacaccaagtggcggcatgagtttatgtaattctggcattccattcgcttttggtccctgatgacgcacgacaacgacacaatcccggtcaagcaggcccgcgtcaaacgcaggcagcacatcatgctgactttcaaataccatggcaggcgcttcaatgatctggttttcaaccggtaccgcagacgtcttcattactgcgcgccccagattaccgcttagcaccttagtaccgccgtgaggagagaacggcttatcaaaagaggcaatgacatcgttatccagtgacctttccgcgccttcacgccagtccagctcgccgttgttgagccagggctccagcgtatagcgtttcaggccgaagcctgcgacagtattaacgtcttcgtgcagcaatccggcattgagcagctcacgcatcaataccggtacgccgcccgccgcctggaagtggttaatgtccgccggaccgttcggatacagacgcgccatcaacggaaccacttccgacaaatccgagaagtcatcccagttgatcagaatgcccgccgcgcgcgccattgcaaccagatgcatggtgtggttggtggagccgccggtagccagcagcgcgacaatgccgttcaccacgactttttcgtcgatcattttaccgagcggcatccacgtattgccgttgccggtaagacgtgttacctgacgtgcggcagcggcagtcaatgcctcgcgcagcggcgcatccggatgcacaaacgaagaacccggcaactgcattcccataaactccaccaccatctggttggtgttggcggtgccgtaaaatgtacaggtgcccggcgcatggtaagaggcggcttccgactccagcagcgccattctgtctacttttccttccgcatatagctgacgaatacggactttttctttattcggcaggccgctcgccatcgggcctgacggaacaaaaatcgcgggtaaatgaccaaaagagagcgcggccatcgccagccccggaacgattttgtcgcatacgccgaggaataacgcgccgtcaaacatattgtgagagaggcctactgctgccgacatcgctatcacttcgcggctgagtaatgacaactccatgccatcctgcccttgcgtaacgccatcgcacattgccggtacgccgcctgcgacctgacctaccgcattcacggaatgcagggcctgacgaataatctgcggataatgttcatacggttgatgcgcagagagcatgtcattgtaggaggtaataatggcgatattattgcgcaacatacttttcagcgaggctttgtcctctggctgacaggcagcgaagccatgcgccaggttgccgcaggccagttgagatcggtggaccgtggcggttttcgcctgctcaatgcgggcaagataggcttctcgggtctgctgcgagcgttcgacaatacgctgtgttacgcgtaacaaattaggattcatagaggctcctgaaatttatctgtccggctaccgggtttaccatgcgtttcatcaatgtggaaagacagtgaaatacatgatgtccggtgataatggggcaaaatcgtttcaggcagtgtaataaaaaaagcctcgcaggtgaatccacacgaggcttaaaagtgcaaaaatgattctacaatctgtgttagatcatgttaccggtaaaataccacctaagagtgagtggcaaatttactcaaactcattccacgaacgaccgtcacgggtaatcatcgccacggacgctaccggtccccaggtgcccgcctgatacggcttcggcgcgtcgttgtccatcgcccatgcttcggtaatggagtccacccacttccaggcttcttccacttcgtcacggcggacaaacagcgcctgaatgccacgcatcgtttccagcagcaggcgttcataggcatccgccaggtgcgtctgattaaaggtctcggagtagctcagatcaagcttcgtgatctgcagattatgcttatgatccagccccggtactttgttaagcacctgaatatctacgccttcatccggctgcaggcgaatcgtcaatttgttctgcggcaggtcttgccaggactctttaaagaggttcagttcaggcgtcttgaaataaaccacgacttcagagcacttggttggcagacgcttgccggtgcgcagatagaatggcacgcccgcccaacgccagttatcgatgtcgacgcggatcgcgacgaatgtttcggtgttgctgcttttattcgcgccctcttcttccagatagcccggcaccttttgcccctgcgcaaagcccgcggtgtattgaccacgaaccgttttttcacgcacgttggagcgatcaatccggcgcagcgatttcaacactttgactttttcatcgcgaatactgtcggcgctcaggtcagacggcggtgacatggcaatcatgcagagaatttgcagcaagtggttctggatcatatcgcgcatctgaccggcctggtcaaagtatccccagcgcccttcaatccccacctcttccgctacggtaatctcaacgtgatcgatagtgcggttatcccagttattaacgaataacgagttggcaaaacgcagcgccagcaggttgagaaccgtttctttacccagatagtggtcgatacgatatacctggcactcttcaaagtattcgccgacccgatcgttaatctcacgcgaggtcgccagcgaagtacccaacggtttttccatcacgacgcgcgccggtttggcgttgagtttagcctctcctaaccctttgcaaatagcgccaaaggtgctgggcggcatcgcaaaatagttaatggtggtgcggtttttttgatccagcatatcgcccaggcgactaaacgcaggcgtatcgttaacgtcaagattacaaaaatccagacggccgctcagcgtatcccacaagccttcatcaattttttccttcatgaaggtttccagcgcttcacgcacaacgtgggtataggcttctttatcccagtccgcgcgccccaccccaatgatacgggtatccggatggatctggccggctttctcaagctgatacagggaaggcagcaatttccggcgcgccaggtcgcctttcgcgccgaaaatgaccaggtcacatgcctgggctgtttgcgttaccgccatgtcattctccttagttaatctcctggtactttagccaggatatcgttgtaattttattacacagcactgtactgcttttacgagattacggaaaccgtaaacgccttttcatggatgaaccggcgtttgattggcaatataatcggcaaaacgcctaataaaattgtcgcttttccacacaagctggaacttaaaatccgacgtcggtcatgtaatgaaaaaaaacgacaccttttttagccattttgcccccttcggcagtcgccaggagtaatatctaacaaaacgcgctcggtttcgcgcatcattgaaatcgctaatacccatgagccttgctaatcatgaatatgctggaaaaagtccagtctcaactggaacatttaagcaaatctgaacgaaaagtcgccgatgttattctggccgccccaggcagatcgattcacttaagcattgccatgctggcccaggaagctaacgttagcgagccaacggtgaaccgtttctgtcgcagcatgaatacccgcggctttcctgattttaaactgcatctggcgcaaagtctggcaaatggcaccccctatgttaatcgcaatgtggatgaagatgacagcgtcgaggcctatacagggaaaatcttcgagtccgctatggccagtctcgaccatgttcgccagtcgctggataaatcggccgtcaaccgcgccgtcgatttactgacccaggcaaaaaaaatcgccttttttggtcttggttcctccgccgcggtcgcgcatgacgccatgaataagttttttcgcttcaatgtaccggtgatttactccgacgatatcgtgctgcaacggatgagctgtatgaattgtagcgatgatgacgtcgtcgtgctcatttcgcatactggcagaaccaagagcctggtggaactggcgcagttggcgcgggaaaacgatgcgatggtgatcgccctgacctccgctggaacgccgctggcgcgcgaagccacgctggccattaccctcgacgtaccggaagatacagacatttatatgcccatggtctctcgacttgctcagctgaccgtgatagatgtgctggcaacgggatttactttgcgtcgcggggcaaaattcagagataacttgaagcgtgtcaaggaagcgctcaaggaatcgcgttttgataaagaattactcatcaagagtgatgaccgctaaaagcaataacaatgttctacccttttcgtcatccggggacgttcattttataccgttaaggtttcagaacgaccggatcaatgttcacgcaacaccaagttgttttagtcaacggagtattacatgtccagaaggcttcgcagaaccaaaatcgttaccacgttaggcccggcaactgaccgcgataacaaccttgagaaggttatcgccgcgggcgcaaacgtagtacgtatgaacttctctcacggctcgccggaagatcataaaatgcgtgctgataaagtccgtgagattgccgccaaactggggcgtcatgtggctattttaggcgacctgcaagggccaaaaattcgcgtttccacttttaaagaaggcaaagtgttcctcaacatcggggacaaatttctgttagacgctaacctgggtaaaggcgaaggcgacaaagaaaaagtcggcattgattacaaagggttgccggcagacgtcgttcctggcgatatcctgctgcttgacgatggtcgagtgcagttgaaagtgcttgaagtccagggcatgaaagtctttaccgaggtcaccgtcggcggcccgctgtctaacaataaaggcattaacaagctcggcggcgggctttctgctgaagcgctgaccgaaaaagacaaagccgatattcaaaccgctgcgctgataggtgttgactatctggccgtctccttcccgcgctgcggcgaagatctgaactatgcacgccgcctggcgcgcgacgccggctgcgacgcgaaaattgtggctaaggtcgaacgcgccgaagcggtatgcgaccaaaacgccatggacgatatcattctggcctctgacgttgtgatggtcgcacgtggcgatctgggcgttgaaatcggcgatccggagctggttggtatccagaaagcgctgattcgccgtgcgcgtcagctaaaccgcgcagtcatcaccgcaacgcaaatgatggagtcgatgatcaccaacccgatgccgacccgtgcggaagtgatggacgtggcgaacgccgtcctggatggcacggatgcggttatgctgtctgccgaaaccgcagccggtcagtatccttctgaaaccgttgccgcaatggcgcgcgtctgcctgggcgcagaaaaaatccccagcatcaatgtgtctaaacaccgtctcgacgtgcagttcgacaacgttgaagaagccattgccatgtctgcgatgtatgcggcaaaccatctgaaaggcgttaccgcgatcatcaccatgacggaatccggtcgtaccgcgctaatgacttcccgtatcagctccggcctgccgattttcgccatgtcgcgccatgaacgcacgctgaacctgaccgcgctctatcgcggagtaacgccggtgcattttgatagcgcggctgatggcgttgtcgcggcacatgaagctgttaatctgctgcgcgataaagggtatctggtttccggcgacctggttatcgtgacccagggcgatgtcatgagcaccgtcggttcaaccaataccacgcgtattttgaccgttgagtaaaactcccccacgcctgttcatcaggtagtacagggtttgtcagcataaagcctctcttacgagaggctttatttatttgatgggataaagatctttacgcttatacggctgaatctcgcctggcttgcgggttttgagcagcttcaggatccaggtgtactgttccggatgcgggccgacaaaaatttcgacctcttcgttcatccgtctggcgatagtgtggtcgtcagccgtgagcagatcgtccattggcgggcgaatctggatagtcaggcgatgcgttttaccattatacaccgggaaaagcggtatcacgcgtgcgcggcacactttcatcagccgaccaattgcaggcagcgtcgctttgtatgtcgcaaagaaatcaacgaattcactatgctccgggccgtgatcctggtccggcaggtagtaaccccagtagccctgacgaacagactgaataaagggtttaatcccgtcattacgcgcatgcaaacgtccgccgaaacgccgacgcactgtgttccagatatagtcaaaaaccggattaccctgattatgaaacatcgccgccattttttgcccctgagaggccatcagcatggctggaatgtcgacgccccagccatgcggtacgagaaaaatgactttttcgtcgttacgacgcatctcctcgataatctccagaccttcccagtcaacacgctgttgaatttttttcggaccgcgcatcgccaactcagccatcatcgccattgcctgtggcgcggtggcgaacatctcatcgacaatcgcttcgcgctcagcttcgctacgctgcggaaagcacaacgacagattaattagcgcccggcgacgagaactcttccccagccgtccggcaaaacgccccagcgtcgccagcaaagggtcgcggaatgatgccggtgttaatgcgatccccgccattgccgccgcgcccaaccaggcgccccaatactgtggatagcgaaaggatttttcgaattcagggatatactcactattattttttttggtttccatgcttttccagggtctgctgacgcgaaaaggaattgtgaatagtgtagcgacgtctgcgtctcacacaaaacaaaaaagccggcacacatcgcgtaccggctctgtcagcgcatttgttaatcgaagcgcagttgcggcagaacctctttcacctgtgccaggtattcacgacgatctgaccccgtcagaccttccgtgcgcggcaattttgctgtcagagggttaacggcttgctggttgatccatacctcataatgcagatgcggccctgtggaacgcccggtgttaccagaaagcgcaatacgatcgccacgtttcactttttgccccggtttcaccagcagcttacgcaagtgcatgtaacgtgtggtgtaggtgcgtccatgacgaatcgcaatgtagtaaccggcagcgccgctacgtttagcgaccacgacctcgccatcccccaccgacagcaccggcgtaccctgcggcatcgcaaagtcaacgccacgatgcggcgcaacgcgtccggtaaccgggttcagacgacgcggattgaagttggaggagatgcggaactgtttagcggtcgggaagcgtaaaaagcctttcgccagaccaaccccattacggtcatagaatttaccgtcagcggcgcgaatggcgtagtaatctttaccatcggaacgcatccgcacgcccaacaactgactctgttcacgcttgccatccagcatctcgcgcgacatcagaaccgaaaattcatcgccctttttcagcttgcgaaaatccatctgccactgcatggcttttatcactgcgctgatttcgctgctggttaaaccggcctctttcgcgctggcgacaaagctaccccctaccgtacctttcagcagactgttgacccagtccccctgctgcatttcactgctcattttaaaaccgttggcagtgcgatcgtaggtacgcgtttcacggcgggagacttcccatgtcagacgctgtaaatcgccatcagcggtcagtgtccaggaaagctgttggccaattttcagattgcgcagctccttatcagaagcggcaagtcggctaatatcgctcatatcgatgccgtactgattcagaatgctgcttaacgtatcgcctgtggagacgacgtattcatggacgccgacttcgcctgcggttttatcgtccagctcatcctgaggaatagcttcatcttcctgcgcggcctgatcgatgggttcgctggcctccggtaagagggaacgaatctcgcttttctccagttcaatagttttaacgattggcgcggattctgggtggtaaacatagggccgccatacggcgacggccagtgtcagaacggtaagtgaccccagcataacgcggtggggtcggggcagattattaaatgccagggcgacagagcgggctatctgttgcacgtattcacttcctcgttaatctcctttcaggcagctcgcatactggttggctaattggcttaaaaacgctgaatagcttgttttacccagtttaatgttcgtcccgagggggtccagtgttcccattcgaacggatgtccctctcgccacggcttccacgaccgctggcctgaattgtggctcagcaaaaacgcaggttgctttttgctcaaccaactgtgttcttatttcatgtaaacgctgcgcgccaggttgtatctcagggttcacggtaaagtgaccgagcggggtgagtccgtagtgtttttcgtagtaaccgtaggcgtcatgaaaaacgaaataccctttccccttgagcggcgcgagctcgttaccgacctgtttatcggttgcggctaattgtgcctcaaaatccttcaggttggcgtcgagtttggctcgactttgcggcataagttccactaatttttcatggattgcaaccgctgtagcccgcgctatctctggggagagccaaagatgcatgttatattcgccgtgatggtgatgtacgtcacctttttcctcatcggcgcccgtatgcgcatgttcatcctcatcatcatccgcgcccttcatgagtaacggttttacatcggcaagttgcgcaatggtaacctgcttattatcagggatattcctgaccgacttctccataaaggcttccatttccgggccaacccagacgactaagtccgcgccctgtaagcgttttacgtctgatggacgcaatgaataatcatgctcggaagccccatccggaagtaatacttgcgtatccgtaacgccatcagcaatggcggaagcgatgaacccaagcggtttaagcgaagcgacaacggcggcgtcggcagcctgggttgcactcccccaaagcgcggcggataatgctgcgaaaagaagcgtatttttctgtaacataatgcgactaatcatcgtaatgaatgtgtgaaatgtgatattataacattctatcacttctgcaagcctaaaattaacatgacaagtttagtttcactggaaaacgtctcggtctcatttggtcaacgccgcgtcctctctgacgtgtcgcttgaattgagccccggaaaaattttaacgcttctcggccctaacggcgcggggaagtcaacgcttgtacgcgtggttttaggactggtagcccctgatgaaggggtgatcaagcacaacgggcaactccgtatcggctatgtcccgcaaaagctctatctcgataccacgcttccgctgacggtaaaccgatttttacgtttacgtcccggcacgcaaaaaacggatattctcccggcgcttaaacgcgttcaggccggacatttgattgacgcgcccatgcaaaaactctccggcggtgagacacagcgcgtactgctggcgcgtgctctgcttaacaggcctcagttgctggtacttgatgagccgacgcaaggcgtggatgtcaacggccaggtcgcgttatacgaccttatcgatcagctgcgtcgcgaactcgattgcgccgtgctgatggtgtcacatgacctacatctggtcatggcaaagacggatgaagtgttatgcctgaaccatcatatttgctgttccggcgcgccggaagtggtgtctatgcatccggaatttatctctatgtttggcccgcgaggcgcggagcaattagggatttatcgccatcatcataatcatcgccacgatttacagggtcgtattgtactgcgccggggaaatggtcactcatgattgaattattactgcccggctggctggccgggatgatgctggcctgcgccgctggtcctttgggctcatttgtggtctggcgtcggatgtcctattttggcgatacgctggctcacgcgtcgcttctgggcgtggcgtttggcctgttgctggacgttaaccccttttatgcggtaatcgccgttacgctgctgctggccgccggtctggtatggctggagaaacgccctcacctcgcgattgataccttactgggcattatggcgcacagcgccttatctttaggactggtcgtggtcagcctgatgtccaacgtccgcgttgatttaatggcttatctgtttggcgatttgctggccgtcacgccggaagatcttatctcgatcgctattggggtcgttattgtgctggccattctcttctggcagtggcgcaacttgctgtcaatgactatcagtccggatcttgcctttgtcgatggcgtgaagttacagcgcgtgaagctgctattgatgctggtaacggcgttaactattggcgtggcgatgaagtttgtcggagcgctgatcattacgtcgctgctgattatccccgccgcaaccgcgcgtcgctttgcccgtacgccggagcagatggcgggcgtcgccgttggtgtaggtatgatagcggttacaggtggactgaccttctcagccttttatgataccccggcagggccatccgtagtgctgtgtgccgcgctgctgtttatcttcagtatgatgaaaaagcaggcaagctaagcgtgtgttgcccggtggcgctgcgcttaccgggcctacaaaatcgcccaggtctgatgagcgcagcgacttcaggcgctaaggcatctctggcggcgtgatcccgaaatggttccaggcgcgcaccgttgccatacgcccacgcggcgtacgctgcaaaaagccttgctgaatcagatacggctccagcacatcctcaatggtttcacgctcttcgccaatcgccgccgccaggttatccagtcccaccggaccaccgaagaatttatcaataaccgccagcagcagcttgcgatccatatagtcaaacccttccgcatcgacgttcagcatatccagcgcctgcgcggcaatttccgctgaaatagccccgtcatgcttcacctcagcaaaatcacgcacacgtctgagcagacggttggctatacgcggcgtaccgcgcgcccgacgcgccacttccagcgcgccgtcatcgctcatctcaagccccatgtgccttgcgctgcgcccaacgatgtgctgcagatcgggcacctggtagaactccaggcgctgcacaataccaaaacggtcacgtagcggggacgttaacgacccggcgcgcgtcgtcgcgccaatgagcgtaaacggcggcagatcgatcttaattgaacgtgcggcaggcccttcgccaatcataatatccaactggtaatcttccatcgccggatagagtacctcttccaccaccggtgaaagccggtgaatctcatcaataaacagcacatcatgcggttcaagattggtgagcatagccgccagatcgcctgctttttccagcaccgggccggacgtggttcggagattgacgcccatttcattggcaacgatattcgccagagtcgttttacctaaccctggcgggccgaaaatcagcaagtgatctagtgcgtcgccacgccgttttgccgcctgaataaagatctccatctgggagcgcacctgcggttggccgacatattccgccaataacttcgggcgaatggcgcgatcggcgacgtcttctgcgatcgtggcgcctgctgaaatcaggcgatctgcttctatcatcctttacctcataacgcggcgcgtaacgcgtcgcgaatcagtgtttcactgcttgcatccggacgggcgatcttgcttaccatccgactggcttcttgcggtttataacccagcgccaccagcgcagcaactgcttcttgttctgcatcttccgaggttgggctggccggcgacgtcaataccagatcgaccgctggcgtaaagagatcgccatgtagccctttaaagcggtctttcatttcgacaatcaatcgttcggcagttttcttgccgatacccggcagcttcaccagcgcaccaagctcttcgcgctcaaccgcattgacgaactgttgcgccgacatgccggagaggatcgccagcgccagcttaggcccgacgccattcgttttaattagctctttaaatagcgtgcgctcttgcttattgttaaatccgtacagcaactgcgcatcttcacgcaccacgaagtgggtgaagacgattgcctcctgcccggcctccggcagctcgtaaaagcaggtcataggcatatgtacttcatagcctacgccccctgtctccagcagcacgatcgggggttgtttttcgagaataatgcctctgagtctgcctatcacatgacgctcctgcgtaaagggctgaaaagataatgcactatcataaaaaaagactggatgtttatccagatgaaaaacacgttattcgcctatctcaatggccttcccttcgaatcggtcgcgcaacaccaccgggtgccgccgcgccccatgatgtggagatataataagtgtctataataaatataattcaataacattttctgtaagaataataaataaaaagtccagatacgcattatcactatagcttgaatttcctccggtgaaagcacatcctttataaacatttttaatcatcttgttatttaatcattcaggacagaaattcaatgttattgaaaaatattgtcataggtgcattaatggctattcctgcgctggcgtcagctaatagcctcacggaaacacgggaaagaatggccattgagcaacaagctatcgcctatactgtcagccaaaagtgggacaagctggacgctatgtttcaggaatacaataccggattcccgacaaccagcggcggaactcataaactggttatcgcatggggagggatctataatcttttttcagtagatgtttccgacaatggtatttctggcgtggcaaaagagtggcttaaagcaaaccccaaatccacgggtgcaaggctgctgcaagcaatggtttttgatgctaaagccgtgaatttacgcggtgaaggtgcggccagcacggtggactctgatatatggccgaaatataaaaagctgatgattcaggaaaaagagtatctgttaaagaacaaagatattgccgacaaagatgtgacctggtatcaggaaatggaaatggtcgcacgcaatcttgaggataaagagctgctctatagcactttggaagaagccagcaaaaaatatcccgcctatcaaaatatttatatcgaggccatggttgctcgtttgcctaaatggggtggttctccggaagaagtcgaaaaaatcgccagaatggccgcagaaaaaaacaaagatcaatcgggactttcttactacgcttatatctggagtaatgcaatccattaccaacctgaattaatggctttactgaataaacgtcagattgtctcctgggacgatatgctgcaaggttggagagatcgctacaaacagttcccatcaacccgcacgcttaataatattctgataagctcctgcattgcccgcgataaagactcctttgtgaaagcagataaaatgattcaaggggaaacggagcgggatacctggccacaagggttaaattatcgggaatgccagcagtccttccaataattgccagattaccatcacagtttaatgcacagcattaattgaattaagccgcctctgccgttatatgcagaggtggtttaatgggaaatgtccttcaacctctggaccatgaacgagataaacggtaccgttgttaatcacttccttaccctttacaagaataataatcagcgattgatgaacagtacagactcgatatttttttgcattgcaacctaaccttttgcactttcgcctcctgttccccctggcgcttaatataacgcagagtcagccaaatatttgcgccaaccactcttgccagatcacacctcaaatgcctattaaaaacaaaagcaataagcatgaagagaaacacaaccagacaataacatagactcaaaaaaatatatggcgatacaaacaattatataatattgaaaggacagtccacttattccctgcgttcgtctatcttccctttcactttcacctctggaaagagataaaaacattatcaccgtaaattataatattcatgatggatatttattgataataatatcttgtcattatgtgagtataatgctaattatccaatagcgtaaaataaaggatattattttaggtaataatggaacgtgaacatgaaaaaacattattctgtccaatatgaaaccggggatatcgtctttacctgtataggtgccgcgcttttcggccagatatccaccgcttcacagtgctggagcaaccatgttgggattattattggtcataatggtgatgactatctggtggcggaaagtcgcgtccccctctcaaccgtcaccacgctgtcactgtttatacaacgttcagccggacaacgttacgcggttcgtcgcctgtgcggcggcctgacggtcgaacagaaactcgccatcatggaacaggttcccgcccggctgaataagttttatcacacggggtttaaatatgagtcatcgcgccagttctgctcgaaatttgtgtttgatatctataaagaagcattgtgtattccggtaggcgatattgagacattcgaagaattgcttcacagcaatcctgatgcgaaactcgccttctggaagttctggtttttaggttcaatcccgtgggatcgtaagacggtgacgcccgccagcctgtggcatcatcccaatttagaattaattagcgcctgtggaattgaaacccctcaacgcgaggctgagggagaatgatttagcgcaaccttccccgcgccagattgagtcggctctcgctcatttgcatcgcgttctggctaacatggcaatgcgtaatggcgatagccagcgcatccgcggcatcggcctgcgggttagcggggagctttagcaacgtacgaaccatatgctgtacctggcttttttccgcgctaccaataccgacgacggtttgcttcacctgacgcgccgcgtattcaaacacgggcagttcctgattgaccgcggcgacaatcgcgacgccgcgcgcctgtcccagcttgagggctgaatcggcgttcttcgccataaacacttgttcgatagcaaaatagtccggctggaactgcgtgatgatttccgtcacgcctgcgtatatgagcttcaaacgagacggcaaatcatcgactttggtgcgaatacatccgctgcccagataggtcagttgtctgcctacctggcggataacgccataaccggtaatgcgcgagccggggtcaataccgagaataatcgacacgctataccccctgcccgccggcgtttaacagcaccattacagggtcgccgccacctcatcagagatctcaccgttatggtagacttcctggacatcgtcacagtcttccagcatatcgatcagacgtagcagtttcggcgcggtttccgcatccatatccgctttggttgacgggatcatggacacttcggcgctgtccgctttcagacccgccgcttccagcgcgtcacgcactttgcccatctcttcccaggcagtgtaaacatcaatcgcgccatcatcataggtcacaacatcttccgcgccagcttccagagcagcttccatgatggtgtcttcatcgcctttctcaaaggagatgacccctttcttactgaacaggtacgccactgagccatcggtacccagattaccaccgcacttgctgaaagcatgacgcacttccgctacggtacggttacggttgtcactcagacactcaatcataatggccgtgccgccaggaccataaccttcatagatgatggtttccatgttcgagtcttcatcaccacccacaccgcgagcgatggcacggttcagagtgtcgcgggtcatgttattggccagcgctttatctacagccgcgcgcagacgcgggttggcatccggatcgccgccgcccaatttagctgccgttaccagttcacgaataattttagtgaagattttaccgcgcttggcatcctgcgcagctttacgatgtctggtgttggcccatttactatgacctgccataaatatttcctcaaaaaaagcgcgccttttcaggcgacgttaatgacaaactcttcaatcgcttgccggttactccaggacttggtaagcgccgccgcgtcaggcgcatcaagccactggtacgtcagatgttcagtgaatatcacctgccgctcatgcggtaacgcaaggcagaaccagaattctgtattgtgcataacgcccggcgcatagcgatgacgtaaatgtgaaaaaatttcaaactccaccgtacgttggcagtcgattaaggtcagttgctctgccgcaacatcaatcgtgacctcctctttgacttcacgcacggcggcctgcaacgcggtctccccttcttctatgctgccagtcactgactgccaaaaatccgggtcgtcgcgtcgctgcaacattagcacccgtttcgtatcctgcgcgaaaataaccaccaggaccgaaacggggcgcttgtacactttatccttcacgcgacctcgttgttggctgttgggtgacgccgcgcattgatgaggctcccccttgcgggccgccgcgatatcacgcgaatgatgtcgtgtacattgttcatatcagttattctcggctttcttcacaacctgaatacccaactccgtcaacgctgccaggttggcgaaactcggcgcttcggtcatcagacacgcggcggcggtcgttttcgggaaggcgataacatcacgaatattgtcggtgccggtcaacagcatggtcagacggtccagaccaaacgccaggcccgcgtgcggcggcgtaccgtatttcaacgcatccaacaggaagccgaacttctcgcgctgctcctgctcattgataccgagaataccaaatacggtttgctgcatttcaccgttgtgaatacgcaccgaaccgccgcccacttcatagccgttaatcaccatatcgtaagcgttagcgacggctccttccggcgcagttttcagttcagacgccgtcatgtcacgcggggcggtgaacggatggtgcatcgcggtcagaccgccttcgccgtcgtcttcgaacatcgggaagtcaatcacccacagcggcgcccatttgtcttcgtcggtcaggctcaggtctttgcccagtttcagacgcagcgcgcccagcgcatcggcaaccactttgttgttatctgcgccgaagaagatcatgtcgccgtcctgcgcgccggtacgttcaaggatagcctcgacgatgtcggcggtcaggaacttggccaccggactgttaatcccgtccagacctttcgcgcgctcgttaactttgatatacgccagtcctttcgcgccgtagatcttaacaaagttaccgtaatcgtcgatctgcttacggctaagctgtgcgccgccaggcacacgcagcgctgccacgcggcctttcggatcgttagccgggcccgcgaagaccgcgaactctaccgatttcagcaggtcagcgacatctaccagttccatcgggttacgcaggtctggtttgtcggaaccgtaacgacgttccgcttcggcaaacgtcatgaccgggaaatcccccagatccacgcctttcacttccagccataaatggcgcaccagcgcttccatcacttcgcgcacctgtggcgcggtcatgaaggaggtctcgacgtcgatctgagtaaactccggctgacggtcagcacgtaagtcttcatcacggaagcatttgactatctgatagtaacggtcgaaaccggacatcatcaggagctgtttgaacagctgcggcgactgcggcagcgcgtagaatttacctttgtgcacgcgcgaaggcaccagatagtcgcgcgcgccttccggcgtggctttggtcagcatcggcgtttcaatatcaaggaaaccgtgatcgtccataaaacgacgcaccaggctggtaattttggcgcgggttttcaggcgctgcgccatttccggacgacgtaaatccagatagcggtacttgagacgcgcctcttcggtattaacgtggttagcgtcaagcggcagtgagtctgcgcggttgatgatagtgagagaggacgccagcacttcaatttcgccggtcgccatatccgcattgacgtttttcgcgtcacgcgcacgcacggtgcccgtaacctgaatgcagaactcattacgcagttcagaggccagctttaacgcgtccgcacgatccggatcgaagaacacctgcacaataccttcgcggtcgcgcatatcgataaagatcaggctgccaagatcacgacgacggttgacccaaccacacagagtcacctgctgccccacgtgggacagacgtagctgtccgcaatattctgtacgcatgagatatcccttaacttagccgcaggcggattgttgcctgccatgcaggcgacgaagtcgcagctttagctgtatgtcacaactggatgaaaaaaggcggctattatactggaaattctgccgcacgataagagtcaatccagcatgggagcgataacttgcccgtttcatgcggtatcgacacttggttcatactgactgtacccgggtttttcacgcgggtattgcgtatgctcacaaaaattaacaatatttgtcgccgctttcctctttaatcgcgcttaaggtgtagtgaaatccgctatttttaggagagtgattatcatgctgaaactcaacgcgaccacaaccgccctggtggttattgatttacaggaaggaattcttccgtttgccggcggcccgtatacggcaaatgaggtggtcgcccgcgccgcgcggctggcggaaaagtgtcgtgccaacggctcgcccgtggttatggtacgcgtcggatggtctgatgattatgccgaagcgttaaaacaacccgtggatgccgcaacgcctgcgcacgcgttgccggaaaactggtggacctggcctacggcattgggtaaaaaggacagcgatctggaagtgactaaacgccagtggggcgcgttttacggcaccgatctggaattacagcttcgccgccggggtatcgacaccatcatattgtgcgggatctcaaccaatatcggcgtcgaatccacagcgcgtaacgcctgggagttggggtttaaccttattattgccgaagatgcctgtagcgccgccagcagtgagcagcatcagagcagtatgacacatattttcccgcgcattggccgggtacgcagcgtagaggatattttaaacgccttatgatctacattggcttgccgcaatggtcgcacccgaaatgggcgcggctcggcatcaccagtctggaagagtatgcccgccactttaactgcgtggagggcaacaccacgctttacgcgctgccgaaagcggaaattgtcgatcgctggtatgcgcaaactacggacgatttccgtttttgctttaaatttcccgccaccatttctcaccaggccgcgctgcgccattgcgacgatctggtacaggcgttttttacccgcctggcgccgctggaaacgcgtattggccaatactggctgcagttgcccgccgcctttggaccgcgcgatctccccgccttatggcagtttcttgatgcgctccccgccacgtttacctatggcgtagaagttcgtcatccgtgtttttttgacaaaggtgaggatgaacagcggctcaatcgcgggttacacgcgcgcggcgtaaaccgcgtgatcctggatagtcgtccggtacatgccgcccatccccacagcgaggccgtccgcgacgcgcagcgaaaaaaacccaaagttccggtacatgctgtcgtgacggccagccatccaatggtgcgttttatcggtagcgataatatggcgcaaaaccgtgaatttttcgccgcctggttgcagaaactcccgcagtggcggcagaccaccacgccttttctgtttttacatactccggatatcgcgcaggcgccggaactggtgaatacgctttggcatgatttacgcagcgtcttaccggaaatcggcactgctccgtccattccacagcaatcttctcttttctgaaaatgccccctatcatagacagtgccatcagccattttaaaagggagtttgtatggtaagcgcgctgtatgccgttttgggtgcgttattattaatgaagttctcttttaatgtcgttcgcttgcgaatgcagtaccgtgtcgcctatggcgacggcggttttagcgaattgcaaagcgccatccgtattcatggcaacgcggtggaatatattcctgtcgcgctggtgctgctgctgtttatggaaatgaacggcgccgaaacgtggatggtgcatatctgcggcatcattttaatcgccggtcggctgatgcattattacggttttcaccaccgcctgttccgctggcggcgggcggggatgagcgcgacctggtgcgcattgttgctgatggtgctggcaaacctgtggtatatgccctgggagttggttttctccctgtattagcgcacaatatgcgcctttatttttcccggatgtatacgttatgtctcaccgcgacacgcttttttctgcgcctatcgcccgtctcggcgactggacttttgatgaacgagtagccgaagttttccccgacatgattcagcgttcggtaccaggctactccaacatcatctccatgatcggcatgttagctgaacgctttgtgcagccgaacacgcaggtctacgatctgggctgctcgctgggcgccgcgacgctgtctgttcggcgtaatatccgccatgagcattgtcgcattatcgccgtcgataactccccggccatgattgaacgctgccgccgtcatattgatgcgtataaagcgcctacgccggttgaagtcgttgaaggcgatatccgcgatatcactattgaaaacgcctcgatggtggtgctgaattttaccctgcaattccttgaacctgccgaacgccaggcattgctggataagatttacctggggttgaatcccggcggcgcgctggtactgtcggaaaaatttagctttgaagacgcgaaagtgggcgagctgttattcaacatgcaccacgattttaaacgcgctaatgggtacagcgaactggagatcagccagaagcgcagtatgctggaaaacgtgatgctcaccgactcggtggaaacacataaagcgcgcctgcgtcaggcgggtttcgaacacagtgaactgtggttccagtgctttaatttcgggtcgcttgtcgcgttaaaagccggagttgccgcatgatcgagtttggtaacttttatcagctcattgctaaaaatcatctctcccactggctggaaacattgcccgcgcagattgcctcctggcaacgcgagcagcagcatggcttgtttaaacagtggtcgaacgcggtagaatttttaccggaaatgacgccctggcggctggatttactgcacagcgtcacggcggaaagcgaaacgccgctcagcgaaggtcagctaaagcgtattgatacattgctgcgtaatctgatgccgtggcgtaaaggcccgttctcgctttatggcgtagatattgacaccgaatggcgctccgactggaagtgggatcgcgtactgccgcatctgtcagatttaactggccggacgatccttgatgtcggctgcggcagcggctatcacctgtggcggatgattggcgcgggcgcacatctggcggtcggcatcgatcctacgcagcttttcctctgccagtttgaggcggtgcgtaaactgttgggtaacgatcagcgcgcgcatctgctgccgttgggcattgaacaactcccggcgctgaaagcatttgataccgtcttctcgatgggggtgctttatcaccgtcgctcgccgctggagcatctgtggcagttaaaagatcagttggtcaacgagggtgagctggtactggaaacgctggtcatcgacggcgacgaaaataccgtactggtgccgggtgaccgctacgcgcagatgcgtaacgtctattttattccttccgcgccggcattaaaaaaatggctggaaaaatgcggctttattgatgtgcgtatcgctgacgtttgcgtcactaccaccgaagagcagcgccgtaccgaatggatggttaccgagtcgctggccgattttcttgacccgaacgatcgcagcaagacggtggaaggctatcccgccccgcagcgcgcggtgctgattgcgcgtaaaccgtgatggattgccgaatgaccgttacgtatagcaccgtttctccaaaatagttcaagttgcagcaaggcggcaacgcagcaaatccccgggaacgtaggtagctacgtggccggggtgcgcgaggcggccaacgctgctgcggcttgaaatatgaaggagaaaaaaaggcccctgttgaattggcaggggcctggtacgagcaagcatcatattgggcgacatgatgcaacggtaaaaatcatttggcctgatggcgaacaatgattcctttcatttcagcgaccgccgcaccctctactctatagcgagaatactcgtccgcctgtatatcggcagacatcgataacccctgattgcgatagcgcatcggcgaaggcagtaagactccggcggaactgtgtacttcccgtactccggcatcgaggaaattctgcaggttatttgcacgaacccccgcaccagccataatggttggagcatccccctgggcaataagttccataattattgataaaccttgcgccgcatcggctttttgtccggaagtcagtactcttgctacgcctgcgtcagccagattctttagcgcattgaagggattagcgcacatatcgaaggcgcggtggaatgtcaccgccagcggcccggccgccgccattattttttccattcgcgacatatcgacatccccatcaacggtcaacacgccagtaaccagcccgggaaaacccaactctctgacgaggcggatatcttccagcatggcggcaaattcgccgtcagtgtagtaaaaatccccgccgcgaggacgaataatcggatgtacgggaatcgtaatatgctcgcgtacgctgcgtaagacgccgaaagaaggcgtaagccccccttctttcggcgcggcgcacagttcgatacgatccgcgccgtttcgctgcgcggtgagcgcgcattccatgctgtaacaacagatctcaagtaacgccatattcactccgctcggcaggttaatgggccgcctgttcgctggcgacaatcgcttcaatcgaccatggatgaaattttaccgtgatgcgaccatcggtcacggccagcgtagggtttggcaaacgttcatgctcgccctgtggcgaactggttttaaccactatccccggctgactaagcccctcatccgacaacaacgccagggccctcgcgttcaaggtctccggctcgccgggcagcacgatttcaatatgctcccacccctcgtgtggatagcgtttttctcccggccacggtaattcaataacagaaaaccgccagtgttccacacataccggttcatgcagtttaaacagacaaatcggcctgccgttgatgatattttccgacagtagctcgccgcattgttcaaaaccgcgacgccaacgctccgccgtcgtattctggtgacagcgcaatgaaatgtgatcggcctcaagggcgctaatctgcagaccaaggcgagtggaaagttctctgaacgccagagtgaatcgcggtaaatctgcggaaatatcatgcagttcatcaatgtgttgccagttcgccatatcaggacgctcttcttgctgtgaaaaccgctaatttacgctgttgcgccccggcaaccaacctttgatttgattgggcgtttattgaatgcttatgcagattattgttgcgtatatttcaggcgacgcgccgcgcgcgcaatgctgacgccaacgggcatttgcagtatactcccgccctaattcttaaactggcgcgggcaatacagcccgcttcataaacgtaaggtattccggtgaatattcaggctcttctctcagaaaaagttagtcaggccatgattgctgcaggcgcgcctgcagattgcgagccccaggttcgtcagtcagccaaagttcagttcggcgactatcaggccaacggcatgatggcagttgcgaaaaaactgggtatggccccccgacaacttgcagagcaggtgctgactcatctggatctcagcggcatcgccagcaaggttgaaatcgccggccctggctttatcaatattttcctcgaaccggcttttctcgctgaacaggtgcaacaggcgctggcctccgatcgtctgggcgtttctcagccgactcgtcagacgattgtcgtcgactactccgcgcccaacgtcgcgaaagagatgcacgttggtcatctacgctccacgattatcggcgatgcggcagtgcgcacgctggagtttctgggccatcatgttattcgcgctaaccacgtcggcgactggggcacccagttcggtatgcttatcgcctggctggaaaaacagcagcaggaaaacgcgggcgacatggcgctggcggatctcgaaggattctaccgcgatgcgaaaaagcattatgacgaagatgaagcgtttgccgagcgcgcgcgtaactacgtcgtcaaattgcagagcggtgatacctatttccgtgagatgtggcgtaagctggttgatatcacgatgacgcaaaaccagatcacctatgatcgtctgaacgtcactctgacgcgtgacgatgtgatgggcgaaagtctgtataatccgatgctgccgggcatcgtcgccgatctgaaagccaaaggactggcggttgaaagcgaaggcgcaacggtggttttccttgatgagtttaaaaacaaggaaggcgacccgatgggcgtcattattcagaagaaagatggcggttatctgtataccactaccgatatcgcctgcgccaaataccgttacgaaacgctgcacgccgaccgcgtgctctactacattgactcccgtcagcaccagcacctgatgcaggcctggaccattgtgcgtaaagccggttatgtgccggattccgttccgctggaacaccacatgttcggcatgatgttgggtaaagacggtaaaccgtttaaaactcgcgcgggcggtacggtgaaactggcggacctgctggatgaggcgctggagcgcgcgcgtcgtctggtggcggagaagaacccggatatgccggctgacgagctggaaaaactggctaacgccgtcggtattggcgcggtgaaatacgccgatctgtcaaaaaaccgcaccactgactatatcttcgactgggataatatgttggctttcgaaggcaataccgcaccttatatgcagtatgcctatacgcgtgtgctgtctgttttccgtaaagcgaacatcgacgagcaggcgctggcgagcgcgccggttatcattagcgaagatcgcgaagcgcagcttgctgcccgtctgctgcagtttgaagaaaccctgacggtggtcgcgcgtgaaggtacgccgcacgtcatgtgcgcatatctgtatgacgtcgccgggctgttctccggcttctacgagcactgccctattctcagcgccgagaatgacgcggttcgcaatagccgcctaaaactggcgcaactgacggcgaagacgctgaaactgggtctggatacgttgggtatcgaaaccgtagaacgcatgtaaacgcgccgtcgttaacatcatcaggcctgactccggataacggactcaggcctttttattgccacagcggtatatctgtaacaaatcacaaggaatgacacatttctatagagagatggaacatcttttacctgtgctggcgctgaccgccccgtatcattaggcggcggattgttcaggtacaggtaatgacttttaaagactttgatgcggaagagaaactcttcctgagacgtgtgattgtggcgtttggtgtagtggttgtctgctttggtatcctgatcttcaacctctataacttgcaaatccgccagcaccactactacaccacccgttcgaatgagaacgatatcaagatgctacccgtcgcgcccacgcgcggcatcatttacgatcgcaacggcattccgctggtgcgtaacgtaacctggtatgatatcgcggttacgccctataaaattgccgatatggatgcgctgctaaaacagctcacccctattgttgatctctcccccgacgatatctccgactttcgccgtgcgctaaaatccagtagccgctatcgtccggtggtgctcaaaaacgcgctaacggatgttgaaatcgcacgctttgcggtcaatcagtttcatttcaacggcgtcacgatcaatagctatcaggatcggcagtatccttacggcgcggagctggcgcatgttctcggttacgtgtcaaagataaacgataacgaccttaaagcgctggataaaaaagggctggcagagaattacgcggcggaccataacatcggtaaacaggggattgagcgttactacgaaaacgatcttcatggtaaaaccggttatcaggaggtcgaggtggataatcacgggcgtattgtccgcctgctgaaagacgttcctcccatcgcgggtaagaacattcacctgacgctggatctccatttacaagagtacattgaaagtttgctggccgggcagcgtgctgccgtactggttgaagatccgcacgatggttcagtgctggcgatggtatctatgcccagctacgacccgaacccctttgtaaaaggcattagctatcaggattacggcaaactgctgcacgataaaaatctgccgctgatcaaccgcgtgacgcaagggctttatcctccggcgtcaacggttaaaccctatatggcaatgtccgcgctgttatgcgggattattacgccgcaaaccaccttctttggcgcgccaacctggacgcttcccggcacgcagcggcattaccgggactggaaaaaaaccggacacggtatgctggatgtcactaaagcgattgaggaatctgcggatacctttttctatcaggtcgcttatatgatgggtattgaccgtatcgacacgatgttgtctcagttcggctatggcaaaccgacgggcatcgaccttaatgaagaatatgacgggctgcttcccagccgcgcatggaaacagcgggtccataaaaaagcctggtatcagggcgataccatttctgtcggcatcggccagggttactggattgccacccccatccagatggtaaaagcgatggtggcgctcatcaacaacggtaaggtgattgcccctcacctgttactcaatgaagagagcggcaaaacggtggttccgtatcgtccttcaggaacaccggcacagatagccgatccggcgtcgccatactggggactggtgcgtcaggcgatgtatggcatggcgaatgcacccaacggaacgggctataagttctttcacaccgcgccctacggcattgcggccaaaagcggcacgtcgcaggtatttagcctgaaagaaaatcagacctacaacgcgaaaatgatccccattcgcctgcgcgatcatgtgttttataccgcttttgcaccgtataaaaaccctaaggtcgctattgccttgattctggaaaacggcggaagcgacggcgttaccgccgcacccatcatgcgaaaaatccttgaccacctgtttgatccacaggctgataccacacagccggatcaggcgccatagtcaaataagcaaagcgccatcagacaaggatacggccggaatatctgcatacatcagaaatagttacgcagatattccgtcaaacacagcattgccatcgcctgcccgtaaggcatagaggtcaacggaatatgacggtaaaaatcgagatcgtggcccatgccagtgccaaatgacgtttgcagcagttcaccttccggcgagatatgtttcactatcccccgaatagctttttccgccacctgcgcatagtgccgttcgacatagcgtttgcgcaccgctttaagaataccgtaggcaaaacccgccgtcgccgacgcctcaagataagagtgcggatcgtcaagcagcgtatgccacaaaccgctttcatcctgacatttcgccagcgcggcgatctgcgcattcagtacctggaccagataacggcgcacggcattattttccggcaagtccagcagttcaagaaaatccgggatcacaatggtcagccagctgttgccgcgcgcccagcgagcgttagcgaagttatgatgaccgtcatagctccagccgtggaaccacagccccgtctctttatccatcaaattctgcacgtgcagcaggaactgataggttgcctcttccacgtattccggccggttcaacagtttaccgattttcgccagcggcagcaccgtcatcattagcgtgtcgtcccacatctgctgatgattttcctccgccagcgtgatgtgctgcattccgccgtgatcggtacggggcatttcattcatcgcccattcggcccacgtttccagccacggtaaatacgctggattacgcgtctcttcatagcgatacgccagcgttaaaaacggcgccatcgtattaacgtttttcgtcgtcgcgccttccgcaaaacgatcggcaaaccagtcatcaatgatcttacgcatcgtctggtcgccggtctgttggtaatagtgatacattccgtacaggcccacgccgtgcgtccactcccatccggcccagcctttagtatcgatcacgcgtccgtcgtccagtcgcaataaaaattcgcctgtctcatctttaatattgaccaggttatgcgtcaccttttgcaccagggcttttagttcatctctggcgataaaatgctcaggctgacgcaatagcggactgtgtttgactggataaaccatcatttgcttaacctctgtgtaatgtcgaattcagtgctgcgtgcagttttaccgccgacgcagtcgattcgctacagtaaaagctaagctgggcggaaacctttttgtttctgccattgccagagcgtaaatggcaaaaacgcaaagagtccggcaacctacctcaccattttataaaacagcgtttctatttattcaaaaagagagtcaggtctgctacctggcaaagaaaggggcggttagcggtagttcacaatcacctgattgctccgcacttttaacgccgggataagtcggccgccgccggggacttcccagacaaagcggagcggctcgactgcgggaacatgagcaaaaccgtgggtcgtgccactctgaccatcaagttctacgcaacgggactgggaacataaacgtacccgtaagcccgcgggagtcgggccattcagttcataacgccaggcgaccagcgtcatcacaccggaaaccggctggcgcgccgacaatggcgaagacgatgcggaaacaccccggtaatttaaggttacacccataccgctatcctgccacgcgccttcgcctgcggcctgaaccgtcaggggaaagagcaacaacgccagccatttacgcattattttcctccaatggtcgccgtcatgcggatatgacggttatcggaaagctcaaggttcgacaacaccaccagctgcggtaaactgcgccgcaaaaagcgggacaataatggacgtagcgcatggttaaccagtaataccggcggcgcgccaagcatttcctggcgagaaagcgcttcttgggtctgcgccagcaggcgatccgccaacccaggctcaagtccaccgccgccctgcaatgcctgaagcagcaaacgctccagcgcggtatccaggccaatcacctgcacttcttcattaccggggaaccactgttgcgtaatcgctcgtcctaatgccacgcgtaccacggcggttaattcatgcggatcgctttgtaacggcgcatgttccgccagcgtttccaaaatggtgcgcatatcgcgaatcgggactttttccgccagtaagttttgcaggactttgtgtaaagtcgtgagggtcacgacgccggggaccagatcttccgtgagtttaggcatctcctgagagacacgatccaacagttgctgcgcttcctggcggccaaacagttcggcggagaattggccaatcaagtggttaaggtgcgtcgccacaacggtactggcttccacgacggtaaagccctgaatttgcgcctgctctttcagggcgctttcaatccagatggcatcaaggccaaaagctggatcgacggttttctcgcccggtagcgttcccgccgccgtgccggggttaatagccagccagcgtcccggataggcgtccccgctgccaatctctacccctttcatcaaaatacggtagcgcgcaggctgtaaatccatattgtcgcgaatgtggaccaccggcggcaggaaccccatatcctgcgcgaattttttacgaatactgcgaatacgtccgagcaattcgccatcctgttgaaaatccaccatcgggatcaggcggtagcccacttccattcccagtgaatcctcaagctgtacgtcattccaggtggcttcgaccaccgagttattttccggcatttttaccggctgcggctcctccggcgctttttcttcacgcccgcgcagccaccatgccaggccgagcaaagcggcggtaaaaagtaaaaataccaggttaggcattcctggcaccatgccaagcagccccagcaccgccgccgccagcagcatcacccttggattactgaacagttggccaaccatctgctcgccaacatcctgatcggtactaacgcgggtcacaatgacgcccgccgccgtggagataaccagcgccgggatctgggcgaccaggccgtcgccaatggtcagcagggtgtagctttccgccgcgctgcctatgctcattccgtgctgcaatacgccgaccagcagcccgccgaccacgttaatgaccatgatgagaataccggcgatggcgtcgccgcgtacaaatttacttgccccgtccatcgagccgtagaagtcggcttcctgagtgacttccgaacgccgttttttggcctcgtcttcaccaatcagaccggcattaagatcggcgtcaatcgccatttgcttaccgggcataccatccagcacaaagcgcgcgccgacttcggcaatacgtccggcgcctttggtgatgaccatgaagttgataatgacgaggatgataaaaaccacaatcccgatcgcgaagttaccgccgaccaggaaatgaccgaacgcctccactacctttcccgccgccgccgcgccggtatgcccttccatcaaaataatgcgcgttgaggcaacgttaagcgccagacgcagtagcgtggtaaacagcaggatggtcggaaacgcggcaaaatccagagtacgctgggtaaacatcgccaccagcagcaccataattgatagcgcaatattaaaggtaaacaataagtcgaggataaaagcaggtagcggcagcaccatcatcgacaaaatcagcagaatgaggatcggcccggcaagaatttgccattgcgtcgatttcaggttgctgggcaggcgcagcatcgcgaccagattagccatcagtattcttctcgttcataaaatccagcgcttctggcaccggaaggttctcaggttgtggaggacgttgcccgcccgcaagccgccagcgtttaagctgccagacccaggccaacacttccgcaacggcagcatataactgcccgggaatttgctgaccgatttcggcgtggcgatataatgcccgcgccagcggcggcgcttctaaagtgggaacccgatgttcagcgccgatctcgcgaatgcgcagcgctattaatccagcccccttcgcgaccactttcggcgcgctcattttgttttcgtcatactgcagcgccacggaatagtgcgtcgggttagtgacaatgacgtccgctttcggcacatcttccatcatgcggcgctgcgcggcggcgcgttgcatctggcgaattttgcccttaacatgcggatcgccttcgctctctttaaattcgtcgcgaatgtcctgccgcgacatgcgtaattttttcaggtggctaaagatctggaaaaacacgtcaaatcccaccatcggaatcacgcccagtaccaccagtaacgcgcagagtccaaccagatccagcgcattccccattgcgacgatcggcgactccgccatcaggcgcatcatttgcggccagtgatgccagagataaaagccggtaacgcagccgaccagcgtggatttcaacaccgcttttagcaattccgcgccggtctgcgccgaaaacatgcgcttaattcccggcagcgggtttaatttagaaaattttggctgtagcgacttaccgctaaaaatcaggccgccaagcataaccggcgagataagcgccaccagcaccacgcccgcgatgagcggtagcagtgccatcatcgccgctttaatcagcaaaattatctgccccaggatcaggttaggatcgttcaccatacggtgatcgaagtgcaggcctgctgagagcattcccgccagctgccgcgctaacgactcgccgccgaaccaaataatacaaacgcccaccagcaatatcagcagtgaggtcagttctctggaacgggggatctgcccttcttcccgcgctttttcaagtcggtggggtgtgggggcttctgttttgtcgtcgtcgctctcttctgccacgcagcaaaccctggatagattgataagagagaatgatgccagaaccgctttacgccaataggcagagtaagcggtaaaaaaggcggggtttatggcgttaatagagatagccggatacgataagaaagtctcgtatccggccgggttgacggattcgaacccgataagcgcagcgccatcaggtcaaaaaagcttaaaagccaagactgtccagcaggtcgtccacctgatcctgactggcaacgacgccagctttcgaggtatccacctgcgggccgttgagcaagctttcgttctcgcgttttggtcgcgcgctctgttccgggatgttttccagcagcaccattaacaactggcgttcaatctcctgaatcacgtccatcatgcgtttgatcacctgacccgtcagatcctggaaatcctgcgccatcatgatgtccagcagttgcgcgttagtaaagctggtatggcccgggacatccctgagaaactggcgcgtatccgtcaccagttcacgggcgtcggaaagctcgatcggattgtcaaaccactcgtcccaacgttgggttagcgctttcgcctctttttccatcgcatcctgatgcggctgcgaggcttcgacactgtttagcgcgcgttccgccgcctgcgccgtcatctggacgacataatccagacggtcgcgcgcatcagggatcgcctccgccgcttcggcaatcgcctggtccagccccagttcacgcaggctgtcgcgcagcattcgggtcagactaccgatgcgcgcaatgatgtctcctgctgagccttcatcagcaggcttgatagatggttgcatcatcatcgcatcctcacatgcccagtttctcaaagattttgttgagcttctcttccagagtcgctgcggtgaacggttttacgacataaccgctggcgccagcctgtgcggcggcgataatattctcttttttggcttccgccgtgaccatcaacacgggtaacgccgacatggcgctatcggcgcgaatggttttcagcagctccaggccatccatgttcggcatgttccagtcggagataataaaaccaaagccgcccgcctggagcttgttcagcgcatcgacgccgtcttcggcctcttccacattgttaaatccaagctcttttaagaggttgcgcacgatacgacgcatggtcgaaaagtcatccacaaccaaaaatttaagctctttatccgccataaaatactactcctggttcaaatacgtatcgcctgtccggcactgattttcgccaacatctgctggcttacctggctaagatcgaccacttcgcttacgccacccatattgatggcctcgcgcggcatgccgaacaccacacaacttgcttcgttttgcgcaatggtccaggcgccagcctggtacatcgctaacattccagcggcgccatcgttgcccatccccgtaagaatgacgcctacggcgttgcgccccgcgtgtttcgccaccgaatgaaacagcacatccacggaaggccgatgccggtttaccggcgggccatcatgaattttgatttgataattcgccccgctacgcgccagctccatatgcttgtcgccgggcgcaatgtaggcatgacctggcaatacgcgttcgccgtcctcggcctccttcacgctgatttgacagagtttattcagacgctcggcaaacgagcgggtaaagccaggcggcatatgctgcgtaataatcactgccggactggaaagcggcagcggttgcagcacatgtcggatagcttcagtaccgcccgttgaagcgccgatagcaatcagtttttccgaactgagcagcggacccgcttttaaggttgtcggggccgccatcggtttatgtgcggcgatgcgggcccgcgcggcggtacgcactttttcggcgatcatctcgctatacgccagcataccttcacgaatgccaagctgcggtttggtgacaaaatcgatggcccccaactccagcgcccgtagcgtcacttcggaacctttcccggtcagcgaagagaccatcaccaccggcatcggtcgcaggcgcatcagtttttccagaaaatcgaggccgtccatacgcggcatctcaacgtccagggtcaatacgtccggattaaattttttgatgagatccctggcgaccaacgggtccggcgcagtcgccaccatctccatatcgctatggctattaataatttcagtcatgatttggcgcattagcgcggaatcatcaactgacaataccctgattttactcatgctttatccttacttagcgcatacaccgtctgtccgcgcaggctaaactcgcgcacgaggttgctaaagttttctgagtgaccggcaaacaacagtccgtcaggtttaaggagtggaacaaaacggcgcagaatgtcctcctgagtcgttttatcaaaatagatcatgacgttacggcaaaaaatcgcgtcaaagggaccgggtacgttgtactgcttttccaataaattaacggaggaaaattcaacataattggccagttcctgacgcacgcgcaccagtccttcatgcggccccgtaccgcgcatgaagtaacgttgtagctgctgcggcgataacgttttcagttcgctgaggcgataaataccgcttctcgctttttccagcacttcagtatcaatatcgctggcgaatactttccagcgaccgggggccatccctaacgcatccgccagcgtaatggcgatactgtaaggttcttctcctgtcgatgccgccgcactccagacgcggtactcgccgtggcggcgacgcgcatgttccgcaaggatgggaaaatggtgcgcctcgcgaaaaaaagcggtcaggttggtagtcagagcgttgataaaagcctgccactcagcgctgttttgattagcctccagcatactgagataacggccaaaatcatccagtcccagggcacgcagccgacggaccaggcggttataaaccatatcccgcttatggtcggccagcacgatccctgcgcgctggtagattaattgacatatccgacgaaaatgcgcgtcggacagcgcgaggcgctgtgtcatctgtaacaatactgacgtttgcccggagggcagagatgatgtcatagcgccttcttaatcacattcaaagtacaacgggcgcgccctgcggcagcgccatgcttcccgtattacacattttttgcttttatctatgcgaaccagacgaaaggtatcggcgggttcgcaaattaatcgataaccgacagcgcacgtcgatcagaaggtttcccagttcgcatcatccctggcggctaatgactgcggcgtattgccggactgagcgttcactgacaaacgcatctcaggtttatttaccgccagcggtcgcgatgccaggcggaaagccgataccgcctgggtcagacggctggcctgctcttccagcgcggcggcggccgctgcggattcctgaaccagcgaggcgttctgttgcgttacgcgatccatttcggaaacggccaaagcgacctgatcgataccccggctttgctcatccgaggcggaggcgatttcgcccatgatatccgtgacgcgcgtaacggcattgacgatgtcagtcatggtttccccggcgctttccaccagcacagaaccggtatcgacacgcgagacggaatcttcaatcaacgcttttatttctttcgccgcctgggcgctgcggctggccagattacgcacctcgcctgccacgaccgcaaaaccgcgcccctgctctcccgcgcgcgccgcttctaccgccgcgttcagcgccagaatgttagtctggaaggcaataccgtcgataacgctgataatgtcagcgatttttttcgaactgtcggcaatttcgtgcatagtgtttactacgccgtcgaccactttgccgccatgacgcgcggtctcggaggcgctttgcgccagttgcgaagcctggcgggcgttatcggcgttttgcttcacggtggccgtcagttgttccatgctggcagccgtctcctccagagcggaggcctgctgttcggtacgggaagagaggtcggtattaccggcggcaatttcactggtgccggaataaatcgcatccgaaccttcacgaacctgcgttacggtgtcaatcagcgagcgttgcatatgttcaaccgttcccgccagttcgccaatttcattacgtcctgagacggtgagcgttttcgtcagatcgccgctggcaatttcacggatatgagtaatcactcgcgctaatgggttaagcagggcatgacgaatgccgaaccaaaccaccatcaaaatcagcaccagcacgaccgcaagaacccccagttgccattgcgcaaaacggtagtcatgagcactttgatcaaatgtctggcggtacaggttttcgctcacccgggcgtaattgcccagcgcctcgcccaacgcgttttgcattccctgggttggctgggcgaagtaggcatccatattgccattgtccagaaactgaataagttcggctaatgcggcctgatagcgctgatatttttcatcgacgttcgcgctggcctccgccatcgctggcaatggcgtcatatttttgaaattggcgtagtgcgccgccgcctgtgcgagagtcgtttttgcattctggagtaaatccgttttggcgctgctctgctggttagaagcgtccatcatcatgcgtgcggcggagcggctcaggttaatgcgcgtttgcagcattaagtcccatgtcgacgtgagttcgctttgttgctgacgtaattcgttagaaataacaaaaccttgctggttatgctgtaatgaagaaaacagcaaaccaccggaaacaagctgtagcagtgcgaaaacccccagcaccatcatcagcattgtgacaacgcggatacggttaaacataaggcaccttcctgataacgagttatcaacgttatcggcacctgcggtgataactttacttttgcaaaaaggaaatacgctgttccggaagacgacattgccaatgacagtgtcgcagcggcgatgccggcgcaaaatgcaggggctgggcgcgggcgatgaagaggcactctcaccgctggcggaagcataacggtgaatattgccggatggcgcgacgccatccggcaacgttattacgcgacgtgtgatgctgcgatatccagcagcgccatctcttcgctgttaagcagtttttcgatattcaccagaatcagcatacgctcgccgagcgcgcccaatcccgtcaaatattctgttgacaaggtcacggcaaattctggcgccggacggatctgttccgccgttaacgacagtacgtcagacacgccgtctaccactatcccgacgacgcgttgccccagattcagtacgatcactaccgtattgtcatcgtactcaacgtcgccttcgcagaatttcacgcgcagatcgacaatggggacaatcacgccgcgcaggttagtcaccccttttataaaggccggtgtattggcgatgcgcgtcacctggtcatagccacggatctcctgcactttcaggatatcgatgccgtactcttcatttcccagtgtaaacaccaggaattcctgacctgacggctcgccggccagtttgcttacattactcataccggtcatattattcccttctcactcaatcaggcggctgtgatcgccatacgttgttcgcggtttaaaccctgcaatgcggaaacatcaacaatcagcgcgacgctgccgtcgcccaggatcgtcgcggcggaaatccccggtaccttgcgataattgctttccagatttttgaccaccacctggtgctgaccgatgagctgatcgaccagcagcgcgtaacggcgtcccgcgctttgcaggatcacaacaatgccctgcgtggcttcggttttcgccccgtccacgtcaaacactttccacaattcgaccagcggcaaatactcgccgcgaacttccagaacccgttcgccgcccgccagcggatgaagatcctcttcacgcggttgcagcgactccatcaccgcattcaacggcaggataaaaacttcccccgccacgcgaaccgacatcccatcgaggatggccagcgtcagcggcagcagaatacgaatcgtggtgccggagccttgttttgactggatctcaacgtgaccgcccatctcctgaatgttacgtttcaccacatccatgccaacgccgcgaccggagacatccgtgacctgttccgcagttgagaatcccggcgcgaagatcaacatgcctacttcatcgtcggtcatgttttcattcaccgccatcccctgcgacatggccttcgccaggatacgctcacggttaagccccgcgccgtcatcggtcacttcaatacaaatattcccgccctgatgttctgcggaaagaatcagattgccgacaacatttttccccgcctcaaggcgtttttccggcatttcaatcccgtggtcgagactgttgcgcaccaggtgcgtcagcgggtcgataatgcgttcgatcaggcttttatcaagttcagtggagctccccaccagcgtcagctctacctgcttgcccagtttgcccgctaaatcgcgtaccagacgcgggaaacggctgaagacgtactccataggcatcatacgaatcgacatcaccgactcttgtaagtcgcgggcgttacgttgtaactgacccatactggtaatgagatcgccgtggtttaccgggtccagctcgttagaacgctgggccaacattgactgggtaatcactaactcgccgaccaggtttatgagctgatccactttctctaccgccacgcgaatgctggtggactcgcgttcacgcgcaggtttttcacgccccgcatgatgttcatgggccgcgcttttggcggctggcgcaacgactgccggaggcgctaccggcgctacctcggttttctcttgcgctttttcaaccggcgcggcgaccactttttcaaaagcgatctgatcggcctcgatgacaaaacagagcaccgcgacaatgtcatcttccgcgacgctgccatccagagttgccgacagtgaatccgcccccttaacgacatccgtcagagtagccagattgcccaactcttcttcaagcagatcgacctcattggctttcaaccgtgaaagtacaatgcgcagtttactctcgtcacgaggcgattcggtttcggctacgctctcttcctggatcgccgcgcttagtgccgcggtttctacgaccgccggcgtggtttcgcctttcgcctccagcgccaactggcgtagcgcattgcagatatattcgaagcttgcggcatccggctcttcggagtttttataggcgtcgagctgttcctgcataatatctttcgtttccaaaaacaggttgataatgtcggtattgagctgcatttcaccgcgtcgggcttcatccagcaggttttccattaaatgcgtggtttcctgcagaatagtgaagccgaatgtgcccgcgccgcctttaatggagtgcgccgcgcgaaaaatggcgttcagttgttcagcgtccggggactccggcaccaaatccagcagatgctgctccatatcagccaacagctcgtcagcttcatcaaaaaatgtctgataaaaatcgctaatatccatgctcacgctatcacctcggttccgcttttggcgatgtgggtacgcttgccggcggggctgccgcaggctgttgtaatacacttaccggctcattctggctttcagcgttttcatgcaaaatggcctgttccgcctgtttgtttaacaccagcaggcttatacggcggttgatggcgtcatcaggaccgcgatcgctcagccgcatcgtggcggccatgccaaccacccgtaatacttttccgttatccagcccgccagcgaccagttcgcgacgagaggcattggcgcgatcggcggataactcccagttgctatagcctttttcgccgttcgcgtagggaaagtcatcggtatggccggccaggctaatgcgattaggtataccgtttaacactggcgcaatcgcacgcaggatatcgcgcatatacggctcaacttcggcgctgccggttttaaacatcgggcggttctggctgtcgataatctggatgcgcaacccctcctgaactaaatcaattttcagatgcggacgtaacgcgcgcagtttgggatcggattcgatcagttgatccagatcgccgcgcagtttgtttaagcgactctgctccatccgttttttcagctcgtcgatattcggctgcttttccacttcaccctgctgttgggtgtaatcatcgccgccgcctggtatcgggctctcgctattggcaatccgattcccccccgttaccgcggtggccaacggcgtacgaaaatattcggcaatctgaattaattctttagggctggagatggaaatcagccacatcaccagaaaaaaagccatcatcgccgtcataaaatcggcgtaggcaattttccaggaaccgtgcgccccgccgccgtgcggtttgtgcctgcggcgttttacgacgacaatgggatgagcctgatttttcatgcttcctcagtcgtctgctgctggtttgggtttctcactgcgcgaacgtgttcttccaactcaataaacgatggacgctcactggaataaagcgttttacgaccaaattccacggcaatcggcggcgcatagccgttcagattagacagcagtgtgatttttacgcactgcatcatcttggtggtttcggcgctcttctggcgcaaaacggtcgctaacggtgaaatgaatccataagccagtaaaataccgaggaacgtacctaccatggcatgggcaatcagcgcccccaactccgctgccggacgatcggctgaagccagagcgtgaaccacccccattaccgccgcgacgataccaaaggcaggcagcgaatcccccaccatcgccagactgttggccgggacttccgcctcgctttcatgggtttcaatctcttcatccatcaacgcttcaatttcgaacgtattcatgttgccgctgatgatcaggcgcagataatcgacaataaaatcaagcattaccgcatcggccagaatacgcggataactggcgaagatttcactctcttttggattttcaatatcgcgttcaagggagaacatcccctgctggcgtgatttggccatcaggcgatagagcaacgccagcaaatccatgtacatagattttgtgtatttcgaacgacgaaataacaacgggatagctttcatcgtgcctttgatggccttcccgttgttgccgacaatgaacgcccctatccccgcgccgccaatgatgaccagttcagcaggttgatagagtgccccaaggtgtccgccggtcatgacataaccgccgaaaactgtaccgataaccaccaggtaacctaataagataagcacgacatcatccttccgctgttgactatgacaggatgcgcagtcgggcgattaacgcgaaggcaaggcaaaaaaaagcagcggtaatgacttaccgctgctggagtgtttgtccacaccgtttcggttaaacagcctgttcgatctgttcatccagcagttgtggaataatatcggcagcatctcgggaaagtttacgtctttttactgcgcgggatggcggctggcataaactacacgcaaagctgcctacgggctgatgcgcatgggtaataaagttcccaccgcagcagttacagctcgacaattcaagcaacccactttcaacaaaacgcaccagcgtccatgcgcgagtcagcgccaacaacggcccttcaggcggttgcggacactgctcaagataaagccgataagctttaatcaccgcatccacaccgctgcataagccggtcttcagtaaaaattgccaggcgttgcagaacatggaggcatgaatattttgctcccaggtcataaaccagtctgtcgaaaatggcagcatccctttaggcggcgggctaccgcgtaattctttgtacagcctgatgaggcgaccacggctgagctgtgtttcgctttccagcatttgtagacgagcgccaagattaatcaactccatcgccaactggatatcgcgagcttcctgaacaatgcttttttcactcattatcatgcccttttcttacgcgccgtatcgtccacttcattgagcagacgcgttgaaagcatgatacctgtgtgaatctgctgtaagtcatcgacgcgcgaatcctgagtcaaacgggtgatcgtctgatgatcgtcaaaccggaaatgacaaactaactggttcgtctccgccagtttgaccatctgcggcagggtcaacgcgcccagtgtgtttgccatctcttcgttgataccgaggcggaacatcgcagatgctttgtcctggacgatcaaacgctgtgcaaggagtaaatatgacaaattgatgtcataaatgtgttttagcaactcggatgtatgcattgttcccatccagaataaccaactttatttttgtgcgacgtagccgcaccccgtgatgtcgccgggaaggcccggtaaaagaagcaaaaaggtcaaatgcatagcagcgctcagacattatggacattgtgacgtataacgcagcctcccactgagattcgccttacacgtttacatcaatttttacaaatgcctaagatttttcctaattcgacgcaactctactcgtcagcttcgtgacatacaacggagcgggacggcgattttagaaaatatgtgatgcagatcacatattttaacggaatacttacgataaaaccatcagcatggcttttactttgtttaattaataacctaatgttcactttttctattccacactgctgaataggggtacgtcaacaccaaattcttttttgtttctctctgttaaaataacgccaggataatagataacaggctattatttctattttagaaacgcttttattttacctttagtaaacagtagcttaaatattaaacgttattaattaatctcgtcacagcatacgccctccgctgttaaaaataagctcatttgatttaacttttagctttccttgttcacccatttaaatgaagcatccgggtggtgtgtaaaaagtgtcttatgccacgattctttacataagaataattaatgattaattatgatgtccttcacattaatgtggcattagcgcattgcagaaatgcgataaacagagtaaagctaaagcacaatctcatattcttgcaatcaaggagcgagttatgagctacacccatattcttgtcgccgttgccgtcaccccggaaagtcaccagctactggctaaagcggtctctatcgcccgccctgttcaggcgaaagtaagcctgattactctcgcttccgatcctgaactgtataaccagttcgccgcgcccatgatggaggatttacgcgcggttatgcatgaagagaccgagaattttcttaagatgctgggggaaaaggcggattatccgattgaacaaactttcatcgcatcaggtgagttaagccagcatattttggctgtgtgccgcaaacaccatgttgatctggtcatttgcggcaaccataaccacagtttcttttcgcgcgcgtcctgctcggcaaaaagtgtcgtcagcgccagccaggtagatgtgttgctggtgcccttagcgggcgactagtcgccgctcgcgatatttcaggccagcttagggaacgtcgccacgttgttctgctgctgacgctcagggctacgcggcgtgacctcctttaggtcatgaataaaacgctcctgccagcggttaatgtcatttttaacgatcacgtccagcatctccgcatgacgcgaaatacgctcggcaaggggcatcgttagcgcacgattgagcgccgccgccacgtcatcccgatcgtaaggattgacgattaacgccgacgtcagttcattcgccgcgccggcaaactgtgacagtaccagtacgccagggttagcggggtcctgcgcggcgacaaactctttcgccaccaggttcatcccgtcacgcaacggggtgacgagcccgacgtctgaataacggaatatcttcattaacagtttacggtcgaaatgttgattcagataatagagcggcgtccagcccaattgtccatatttcccattaatccggcctgcttccgtctcaagctggtggcgaatatcctgatatgcctgtacttcgccgcgtgacgtaggcgcaatttgggtataacgaatttttccccgatgctgcggatagttttccagtagcgcttcatacgccagaaaacgttccggcagccctttcgaataatccagccgctcaacggaaaaaatattcttcacatttttcagttccgccttgagctgcgccagtttaggcggcaacggcccggcagcctgcagagcaatctcatcgggctcaataccgataggatacacttctgtctggaagtctttaccccacgcgatatgctgcttgccgctgcgagtcgtgactcgcgtttgactcgaaaggctatccagaaaagccaggcgatcattttcggtctggaaccctagcagatcaaagtcacacaactgctccagcagttcatcatgcggcggtaaggcgttaaaaatctccggggtcgggaatggaatatgcaggaaaaaaccaattcggttgttcacgccgcgtttacgcagctcgctggcgaacggtaacaggtggtagtcatgcacccaaatgatgtcgttctctttaatgaggggcaataacttatccgctaataacgcattcacccgcatatagccttcccatgcaggacgctgaaactgtaccaggtccagacgatagtggaacgcaggccagagaaccgcattggaaaattgacagtaataatcttcgtaatcttgttcgctcaggttaaacgatgcccaggtaatattaccttttgtcaccttttttaatggctcatcctcgttacctgtctcgccactccagccgaaccacaacccgccagccgcttttagcgcgccaagcacgccaacggcgaggccgccggcgccgcctttattatccgggggggcaattcgattagatactacgactaaacgactcatagccatctctcctgttattcattacttgttgttcttgttgtggataattgatttgttccagccagcgccagacatcgggtacgctttccagccgccatgccgcctgggttgccccgacgcccacttttacggaaattccgccagcgtgattcaccacgccaaagccagcctcatcggtcaaatcgtcgcccacaaaaacgggaatccgtcccgcaaagggcgcctcctgcataaaggcggcaatggcttcgcctttattggttcccttaggtttgatttccacaacacatttaccaggctgcaacgccagttgcggccagtgctgcgtaacgtgttgcgcaagcgccaacagcgccgcttcatgttccggagcctgacggtagtgcagcgcaaatgccatccccttcgactccagctccgttccgggcagcgctacaagcgtcgaacgtaataacgcctctacctcacggactaccgcttcaggaaggcgcacgatatgggttttaccattgatgtcacgacgctctgccccgtgaacgccagcgagtggaaagcgaaaaggcttcgccaaagcatccagctcagtcattgaacgccctgaaatcaatgccagtgcccctgcgttgtgcgccgcgagacggtctaacaactgaaggattttatgcggtaccactacctgatcgggatgaggctttatctctgccaatgtgccatcaaggtcaaaaaaatacgcatagttcgcagtgagttcgggggatacggttaacggttctgccaccctggtctcctccttatcatcatattgagactcacaaacggtctcattagtcatgtaagtatagacagtgtgacgctgctcgccatttagaaagaccatcgccagccggggtagcggctggcgatgacgtgaagctatactgtttagttgagtgttaattcatcaaatcgtacgcttcgctttttgcttataatggtcgaagataactgttgtcagaaggattcagccgcgaaccatacactgtgcaaaaggtgaaatgttgagcaggttcatcgcgctctccaccgctcctgatatcagtacgctcgccaccacatatgagacttttccgaggccgcctttcaggaatccccccctaagacacacgcagaaataacgattaactcataacccagggaagtcattgacctgctttagcgttttttatgtagggtaaaatcaaacgattcttgttagagaagacgtaaaacggtgcactgtctttcattcattagataaatgctgatggcaggaatagttttagcggaaaatgacataacccagagcgaattcatcagccaaaaggcaggaaagccagcacattaatccataacatcagccagctaatccttacggccctgggtgaataacgattaccagggataatagatatgttcagcctgttcgcgaaccggcgcatcgtctcccagcagtctggcggaaagggttagcgcgaaatcaaagacatgacccaaccctttgccgctaattaaattaccatcttcaaccacgggcgcatccacatagacaccttccggaaccgctttccacagatcgccggaacagacataacgacgccccttcagcaatccgtgagcacccagcacccttgccgccgcggaacagataggacaaattaatttgcctgccgcatcatgacgcgcaacgaaagcgatcaccgccggattagccgccagattagcgctcccctgcggaccgcccggtagcactaccgcatcgaaaagcgcctgctggcgttcactcagcgtgctgtccgcaaccataggaatatcatggtaactcaccaccgcccgtgattcagcacacgccagcgtttcgacgtcgatatgcaaacgtcgcagaatatcaagagtaacaatggcctctgcttcttcaaatcctggtgccaacagcaccgcgacctttttcattgactgctccttgttaacgagtcacccagcaaaactgcgctcaaccgaataacgtgctcgtatgattaatgatattaaaaatgatctaccgcaaaatcggctagtttataaaaacaggcatatttgctctcaaccgtttatgcgtgtgatatccagactgactaatgtttattttattgaaattaacatacttgaaaggcttaacccatgatctgaaacaatgtttcataaattacaaatctatataatatcatttaactttcaaagggttgcaactgctcctcatccaaaatcattacacctgaaaaaatcacaccgctgaaaatgtaaaaaaagataaacaattgcatttaaggattttcttatttttattgacgcgctattctcattaccgatcgataaacaggaaatgagatcgcataagggactggcggaacggagttcttctgctaagagtatttattgtgcatagaggtaagaatgtgacaacggcccgttgcattctcgtctgtcatgcacatcaacactttctggaaataaggatattgttatggcagctgtaggaatggttcaaaagctcaacacgccaatgaaccttgagttttacgcatcaaatctttacctccatctaagcgaatggtgttctgaacacagtttaacaggcaccgccacctttcttcgtacccaggcgcaaggcaacgtgacgcaaatgatgcgcatgtttaattttatgaaaaacgccggcgccacccctatcgttaaagccattgacgttccgggtgaagagctctgctctctggaagaattgttccagaaaaccctggaggattatcagcaacgcgccagcacgctgtcgcgtctggcagatgaagcgaaagcgctgaatgatgcctcaacgcttgattttctccataccctggaaaaagagcagcagcaggatggcgtacttttacaaactattctcgaagaagttcgcagcgctaaacgagcagggctatgcctggcgcaaaccgatcagcatctccttaacgtcgtgacctatcagcatcactgatagcggcaccccgagcgacaatattgagacgttattagccggatagcaacgcgaagcagcttatccggcctacaccgtttctgatctgtttgccagaggtggtgcctgtcgctactggcgtattatcggcacatcatgccagccgacaggcgcgaaacgcctctgtcttgtctgggcattaccccagcatctcacgtacaaacgcttctatttctttattctggccgttttcaaacaaacattgctggaaacgcggccctgaaaccgccgttttaaccagttcaggatcgatagcccgtagtgtatccagataattctctttgacgaccgcggccttaacctggttcaaaatgcccgcattgcgtacctgcggcgctttgcgctcaggcggatacccctcgcctttacgcccggtaaacgctttttcaaagatgaaacgcacgttcagctcagcgccccagccaaagcctttcgcaaatggcagggacaacgcattgccgttgttgatctgcgcaaacagaaaagcatctgccggatcgatgcaatagccacaaatgacacctggatgaatatttaacgacatcagcgcgccctgaccagtgccacagccagtaaccacaaaatcaaccgcgtttgcattaagcagaatactcgccatgatgcctaaatgaatgtacgtcaggtgatggtcattttcgtcgcacatgccgacgttaaaaacgggaaatcccttttcattggcgacggcgctaagttcgttataaatgatggcatttttgctggcctggctattttccatcatcagtgcaattttcatcgtgtttctcctgaatgcagacggtcgcgcctgcgtaaatcatgacgttttacccacattacacatttgagaacacacattcaaatttaataaaaccaggtttcattaaatgaaaagacgctcacacattttctgttcccgctgtaaatcccctgccgttacctttaatcaaggcgaatccgtaagttattccagccattgacagtgcaagacacgaggtagcatggtctgataccgaactgtcggagcgattttatgaagcctcttatttttactctttcactgctagccctgacgggatgcaccattactcgacaagcgcaggtcagcgaagccagcccgataagcggcatcgtgcgcctgacgtataaccagccgctattttttacttcacggacagatgattatgtatctcacgggaccgcaacacgcgaatgccagcagatgggctatgccgatgccgtttcgtttggtcagccggtaggaacctgtagcatttatgcgggctcgttgtgtctgaacacccgatttaccctctcctggcagtgccggggcgttgccgtcccgcaaatcatgccgctttattattaaggcggctggcttaacgtcgacaccatctacaatggaggagagtgcagggtcgctattgccagcatgaaggtgctggctttcctttatttttatacgctatacactggcgttaatgcgttttattcccattcgtatttttaataattaaatttaatattttaccttttgcaaataataaaataacaaattatagtggcgccacattaccgtatatcttttgctatttgtggagcggaaccatgctgaaaacagaaatgatcgacaaactgaatgagcaaatgaatctggagttgtactcctccctgctctatcaacaaatgagcgcgtggtgtagctatcacagttttgaaggcgcggccgcatttcttcgtcgccatgcgcaagaagagatgacgcatatgcagcgcctgtttgactaccttaccgataccggaagcctgccgcgcattcataccgtttcttcgcccttcgctgagtacgcctcgctggatgagctgttccgcgcgacctatgagcatgagcagcttattacgcaaaaaattaatgaactggctcatgccgcaatgaccagccaggattatccgacatttaatttcttgcagtggtatgtggcagaacagcatgaagaagaaaaattattcaaatctattattgataaattaacgctggcgggaaaaagcggcgaagggctttatttcattgataaagaactctccaccctggatacgcaaaattaatccaacacgtccttacacggtgagacgcgctctcaccgtggcgtattaatggcggcagattttactctcatgcgttgaaaaaccgtcctccaccgcaataaactttcctttcgccgccagaaacgcgaccagttccgccgccgtcatatctgatgctgaacaagtgtgaaatcgtgcccgctcgccaaagcgcgcttttattgccgcctccagcgaggtatgcgtgtactgctcgccagactcaatcatcatgttgagcacttcgtgaccatgaatggaatccataacccctcctgaataaaactcgtagcctaatgtgtccgtgtacaagcgactttgcgctagcgcaggtttacggcggttgtccgcgtctccttccatattcgcttttatgcccggaactgtaaattttacagtacacccattgtaacgaccatttgacgaaaatagcgtaatgccttaccctgcgccgcggatatcaccgttctttgttaccggggtagtagaaagcgtgaaaaacagaactctgggcagtatttttatcgtggcaggcaccactatcggcgccgggatgctggcaatgccgctggcagcggctggcgttggtttcagcgtcacgctgggattgttgattggtctgtgggcgctgatgtgttataccgcgctactattactggaggtatatcaacacgttccggcggataccgggctgggctcgttggcaaaacgctatcttgggcgttacggacagtggcttacgggattcagtatgatgttcttaatgtatgcgctcactgccgcctacatttccggagccggagaattactggcatcaagtattaataactggcttggcgccacgctctcgcccgctgccggagtactgctgttcacctttgttgccggtggggtggtatgtgtgggcacctcgctggtcgacctttttaaccgcttcctgtttagcgcaaagatcatttttctggtcatcatgcttgcgttgctcacgccacatattcataaagtaaatcttcttacgcttcctttacagcaggggctggcattgtccgccataccggtcattttcacctcgtttggttttcacggaagcgtaccgagtattgtgagttatatgaacggcaacattcgccggctgcgttgggtctttatgacgggtagcgccattccgctagtggcctatattttttggcagctcgccacgctgggaagtatcgactcgccgacattcagagggctactggccagccatgccgggttaaatggcctgctgcaggcgctcagagaagtggtcgcttcgccacatgtcgaactggcggtccacctgttcgccgatctggcgctggcgacctcttttctgggcgtagcgctaggattatttgattacctggccgatctattccagcgccgcagtacggtgtccggacgcctgcaaaccgggctgattacctttctgccgccgctggcgtttgcgcttttctacccacgtggatttgtgatggcattaggctatgccggcgtagcgctggcagtgctggcactactcatccctgccatgctggtctggcaatgccgtaaacagagccctcaggcgggatatcgtgtggcaggcggcacgccagcgctggcgctggtgtttatctgcggcattgtcgtgattggcgtccagttttcgatcgcactggggttcctgcccgatccaggttaacgccaggcaaagattaccgggcccggacgccgtccaggctcgataatcatcacgctatggccgtttacgagccattaatgcaggcagcactgcttaaattttttgccgctcccgcatggacaaggatcgttacgccccactttcacctctgcttttatcggcatctgtagcggcgtcgtgtgcggatgcgccatccaccaggcatgcagctcaagcgccgcgatacggatagcgtcaacgcttttatcgaacgcttccgggctcattttatccaacagcgcaaagttttcttccgtgccgtgtaaggcaatcgcttccagcgccggttttagcgtatccggcaagtcagaccagtcggacagcgacactccgcgcatgtaaccaaagcaccattcttcaacaatcgttaattcatggccatcaacttctcgcaggccaaacagcggctcgaactgttctggatagtcttcaagccgggcggctgtgtccgccatgtgctggaacaccagatccataaatcgcgtcatttctttttcagatgtccagcgcggtacgtacgcgggtcccccccatatcgcgaccagccactgttccgggtcgatgggacgcggagaacttagtaccgcagtaatcagaccgtccagctccgcgacatccaaaatggcctgatcggtattgtatttcgtcagcacatcatccagccattccagctcgttctcgtttaatggttccattttcataacgcttttcctcagtgatgacttccgcctgtaggcctcttacattgcagcggataaaaataatttttttgcaggcagttggatggcaaccatcaggggccagattaacacgaaatgaggaggattccggaagttaacgcacaaaaggaggatcagggcgcagattttccgccaggaagcgctcgccccacacaaaagcgagagatgggtttctcgctatattatactcatgctaacttataccaccgccgcggacagataaaaccgccctctcaaatagagcttattttcagtaaaaaagtgtttaatgagttcgtctaccgcttctctgtcagcagaaaaggttatttccataaacagcgtatcgtaccctattttgatattttttttcttacagtaaacacggatctcatcctgcacactcagcaacggcaggctaaatgtgtatagcggttgcggttcttttttcgccgctttctcaaaaactttagtgaccagatccccaagatcgcgctctgaccgggcaccgttattaaaatgcaataaattacgtctttttaccacccagcctccagccagataccgccaacaataactctcacttcaatgtgtgaggcacataatcacatccagaatcagctccagatagtatttcaaataaacagcccgcactatagcgcatacttttttcagacacagtttacagggatactctctttatatccacgcgcacggttgccttaatcatgtcttccgcgataacacagtttgtcaacctattctatataaccaagcttaaacagaaccttaccagccagtgatatcagctcaggactttcaggataaaaacgcagtaacggcaaaaataccgcctcaccgataatgctccggctattagcatggtttgggcgcaatccccagatattctgataagtcatcggcacgacctgcccattcatggttgtgttaccgatatacagcataatatgccctggaatatagaccagcgtagtaaacggttttccgtatctggtgagataatcgatccgcatttggggacttttatgactaagatcgaccacccgtccagcagcctctacctgcgcggatgaatgtctgggcaggaatatgccaaacggcattaacaggctgcggatttcggctgaacaatcattataaaagttaaaatttccccaaccgtagggggcgccgtacattgctttcattagcacggcgatattttccggcgtcattttccacggcatagccgtaaactcgttaccgcttagccagacccaatggataaacgcgcgaccgttgctgccgcgaactggcgccgcaatcaggaactggcccgcccgttgatgtcggaacggtaaaatagtgcccggtcgcccggtgaaataatagacgcctgcgacatggacagaaaccggcgcgttgataaatgcccccagttgcttatgagcaagcaaaacccactgtgttataaatttctgatccgtactggcaatatcttcactatgaacccagccagttaccgctggtgaaacgacatattgccagcgttggtctttgctcttcgtcagcgtatagaccggcgtaccgggacgcagcgaagacatttgtaaattatcaaacgggtacccctcgcccgcctgacggggatcgttaaagagcgggtcgtccgttggcagcgctctgactaaactttctctgaccataatacctcgccgggaggcatgatagatattgtcaatctgcgtatccgtattccctctaacctcctctttccagcgagaggtataaagtctgaagttttccccccaataagcactgccgtcgctaagaaactgcttaatactggcatcccgcgcctgtgctgcgttttttttcagcaatgcggtaatataaaaaccattccacggcgagtgcgcttcactgtccattccgaaataatgagattttagtgcgttaaagtagcgttgttgggtagcattatcaataaccggaatagtgtaatcagccgagtccggaggtatccatttatcaaccgactgtgaataatccgctaacggaaagcgtgtttttgtcgggtcaatatagctccctgtgaaaatttcatctttggctgttgatcggtaggtcgtctggtggcaagcggtgaggcacaatggtatcaataaaacggcccaggttttcttttgcatcatcatctccgtaaagcggggaaagcataatatagagactgaccaaaaccgccattcacgaaaacctgaaattatctgtagttgacctgttattaagacaatattgcaaaacgtgattaaagcatgatgcggatcacattaccttatgatgaatattagttcgctatctacctttaattaaactgtgcagaaaacaccctgaacagttatatactcgtttaatttgcataaatactccactgacccgcccctgtttttttcagacaatacatactgtagcgcgtcagttctactttttttatatactctgcaaagtcgttttcatcgacgtagccaataaaattacgcgcatcacatgtcgaagaggaaagctctcctggaaaagagtaggttacgattgcactctcaggctcatacaaaataaaaaaaagtagcaaagcgcaacctacaatcccaatattaatgaagctaataaataattttgcattatcggtatatttcactggcagacctactctctttaataaagcaggcataaaacatatcagcattttttatagagattaatggattttatcggctgatttacccgacgtttagtaattaccaggcataagttcttgcgggtcggtagcacataactgttgtactggcagaaatgccgctaccgatgttttttactgtgtatcgcgctggaaagttcacgctcgcggtcggcatacaaattgaaggcacaaaaaaaccacccgtaggtggtttcacgacactgcttattgctttgattattcttgtctttcccatggtacccggagcgggacttgaacccgcacagcgcgaacgccgagggattttaaatcccttgtgtctaccgattccaccatccgggctcgggaaaaattggaggcgcgttccggagtcgaaccggactagacggatttgcaatccgctacataaccgctttgttaacgcgccaaatttttttggcttttcagccagcatccgctttacgccaatgcttttaaactggagcgggaaacgagactcgaactcgcgaccccgaccttggcaaggtcgtgctctaccaactgagctattcccgcagtatcaagcaactttgttaatcacttgattttgttatcgtctggcaatcagtgctgccgttcgatgcgttgcattctacttacctgacgcactgagtcaacgatatttttcgtcactcacgatcgtttgctgaaatttgcggcgaaacgatcactgatcaagcaaatctccgcgtgcagcgctcaaatattgcaacatggaccacaatgttagcaccgctgcgacaaagaaaagcgcgatcccggcatactctacccagatattcggacgccacaagagccacgccagcgccaccatctgcgcggtagttttgactttaccgatccaggagaccgctacactactgcgtttgcccagctccgccatccattcacgcagagcagagataataatttcgcgggctatcatcgtcgccgcaggtaacgtcacccaccagctatgataatgctcggtgaccagcaccatggcgatcgccaccagcaccttgtcggcgacggggtcgaggaaagcgccgaaacgcgtactctggttccagcgtcgcgccagaaagccgtcaaaccagtcggtaatagcggcaatacagaaaatcagcgcgctgaccatcggcgcccaggcgaacggcaaataaaacaccacgacaaagaatggaatcaggatgacgcgaaacagcgtgagcaacgtagggatattaaattgcatagtgacgggtaactatctgttgtcagtgaaattacccctatgttgctacagtggcctcaatgtttcaacgaccagaagatcttttctgccagaccttgcgaaatacccggcacttttgcaatttcttctacgctggcgttacgtagtccttgcaaaccgcccatatatttcagcagcatctggcgacgtttaggcccaacgccttcaatagtttccagcgtactggtatttttaaccttcgcgcgttttttacggtgcccgccgatcgcgtgatcgtgcgactcatcgcgaatatgctgaataacatgcagcgccggcgagtccggcggcaggctaaacccctcgccttccggttcaaaaaagagtgtttccagaccggcctttctgtccgcgcctttggcgacgccaagcagcaaaggacgatgcttatcccaggggacatccagctcagcgaaaacggctttcgcctgggcgagctgcccttttccgccgtcgatcagaataacatccggaatcttactttcttctatggccttgccataacgccgacgtaacacctgattcatcgccgcgtagtcatcacccggcgtgatgcccgcgatattataacgacgatactcggcgcgtaacggcccgttagcgtcaaataccacacaggatgcgaccgtttgctcccccatggtatggctgatgtcaaaacattccatccgcttgatcgcaggaagttttaataccgccgccagcgcgctcaaacgctgcgtgatggtggactgctgcgagagtttagtgattaaggccgttgccgcgttggtccgcgccagcttgagataacgggcgcgatcgccgcgcggttttgtctggacatgaatacgccgtccggcaagttccgacaacgaatcggccagcagcgttttatcactcagattaaaatcgagcagtatctcgcccggtagcgtgcgcatctggctaccctgcaggtaaaactgcccgacaaaggtttccaccacttcgcccagttccgtaccaccaggtacttttggaaaatagctgcggctgcccagcaccttaccctggcgaataaacagcacatgcacacaggccatacccgcatcaaaagccacgccgataacgtcgagatcgtcgcccgcattggagacaaactgtttttccgtgacccggcgtaccgcctggatctgatcgcgaatacgcgccgcctcttcaaatgccagatcctggctggccttttccatccgggcaatcagctgtgttaagacctggtcgtccttaccggacaaaaacaaccggacatactccacctgttgcgcatactcctcctcgctgaccagtcctgcaacgcaggggcctaaacagcggccaatctgatattgcaggcaaggacgcgagcggttgcgatatacgctgttttcgcactggcggatagggaaaattttctgtaacagcgccagcgtttcccgcacggcatagccattaggaaatgggccgaagtactcgcctttcgcatgtttggcgccacggtgcatcgccagacgcggatgggtatcgccgctcagaaaaataaaaggataggatttatcatcacgcaacaacacgttgtaacgcggttgatacaacttgatgtaattatgctcaagcagcagcgcttccgtttcggtatgcgttaccgtgacatcaatgtgttgaatttgcgcaactagcgcttcggttttacgcgaagccaggttgctgcgaaagtagctggaaagacgctttttcaggtcttttgctttaccgacataaataaccgtaccgccggcgtcatacatacgatagacaccgggttggctggtaacggttttcaaaaacgcctttgcgtcaaatatttcactcactggcttgttaacgtctccgcattacacaggccatggcggattgccaggtgagtcagctcaacatcaccatgaatgtttaatttactgaacatacgatagcgatagctgttcaccgttttaggactgagattcagctgttctgaaatctcattgaccttctgacccttggtgatcatcagcataatctgcaactcgcgttcagacaaactggcgaacggcgtttccgtttttgcaggctcaatctgactgagcgccatctgctgagcgatatcggaggcgatataacgttgtccggaatacaccgaacgaatagcgctcaccacctcctgaggcgcagcgcctttgctgagatagccagctgcgccagcctgcatcactttggcgggcaacgggttctccgtatggacggtcagcatgatcactttgatatccgctgtcgagcgggcaattttacgcgtcgcctcaaggccgccaataccgggcatgttcatatccatcagcacgacgtcaacggcgttagtacggcaccattttaccgcatcctctccgcagcacgcttcaccgacaactttaatgccctttatatcttcaagaatgcgtcgtatccctgcgcgcaccagttcgtggtcatcaacaagaagaacgttgatcaaaggaatatctccagaatagggataacgctactgatagttaatcgtccttatattagctggttttatctcaactttgaaacgtaaaaaaacaccgggtattcgattttgctctcgtttttggaaattatgttgtacgtcatgtggcaactgccaacgttgtagccccttctggcggcgctgtcccgggctgatatttcataatggtgacaaaaatttcacgttccgctgtctaaacactaattagagaatcaactttgtaacaataattaacgagtgaaatacgcgtaataaacaaagaatgaagaaaatatatgcatcacgcggcaacgtttattttgtgggtaacccctccgctttttgatcaaaaaacaaccactgctatttttagcgtagcttatggtatactccgccgccttaacatctgctatcgcacattttcactgaaacataacgaggaaaataaatgagtacgcctgatttttccaccgctgagaataatcaagaactggctactgaagtcaactgcctgaaagccatgttaacgctgatgctgcaggcgatgggccaggccgatgcagggcgcgtgattcttaaaatggaaaaacagatcgcgcagatggatgatgaagcacaagcggcggtattttccagtacggttaagcaaattaaacaggcttaccgccagtagtaaaaaaccggctgttagcatcgctttcagccggtttcgcgtctggcgcgaagcatcgtcagcacgtcatatcagacctgtcgccgcagcgtagcaggcaatctgtgttttatttggcgcattgaatttcttctgcatatttttctgatggaagttaacggtattttcagaaatcgacagaataatggcgatctccgatgaggtcttcccttccgccgtccacttcagaatctctttctcacgtttactgaaacgcatttcaggcgccatcaccatgtcgtcttcaaatcttgtcagcgccgaaagactctcccgcgccagcagttgcaacctcagctccacttcgtcgtaggtaaacgaggagcagcgtaaactgctacgggagaaagataaaaagcccagcgcccggttcggcaacatcacacactgggttacgcctctgcgtaatccgaaacgctgggcggcatcccacatcgccttcgcttcatgaaatagcacgtcatcccaatgtaaatgaccctgcctgaaattttccggctttaataccggatcgatcgcgaaatagttttcggactggtaatgcgttacccacgccggaggataagtggtacgaagcgatattttaggccgggtaaaggggacgggatgacgaacacacagggcataataatcaaattccagccgctgtgtctgatattgcaattcagtataaacatcctctgctgccgccatctcctgaaagcgtaacaacattgcgcgtcgccaggtgaagaaatcattttcctgcatattttatggtcacgcctttgatattgataatcattattatgaatgacttaaattaacacataaatagtgtttatatataagaaatatcggacgaaacgtagaatacttgagcggcattacactttttggcttccgcctgagagcgaggttaataatctggcagaatgacttcataattattcattgcgctcgcccaaggcgcggctaattcgggcgagcgttgaaaaggcattatttcactaaaaatttctcaaggaactggcgggtacgcggatgctgaggatcggcgaacaaggttttcgccggcccctgctcgacgatttgcccctgatccataaatattgcccgatcagccacgtcacgcgcaaagctcatttcgtgagtaacgatcaccattgtgcgcttttcctgcgccagctggcgaatcgtattaagcacctcgccgactaattcaggatcaagcgccgacgtcggctcatcaaacagaatcacttccgggcgcatcgccagcgcgcgcgcaatcgccacgcgctgctgttgcccgcccgacaggcggcgcggataacgggactctttaccggccaacccgactttggctaacagttcccgcgccagcgccgtcgcctcggctttcggctctccctttacaatcaccggaccttcaatgatattttccagcacggtacgatgcgggaacaggttaaaactctgaaagacaaagccgacatgctggcgtagctggcgaatcaaccctttttgctggctgaatgggcgggcggtatcgatgataatatcgcccactttaatggtgcccgcttccggttgttccagcaggttaatacagcgtaataacgttgtcttccctgagccgctcgggccgataatggcgacgacttctccgggcttcacctcaaggtcaataccgtgcagcaccgtttgaccatgaaattttttgaccaggttggtaacttcgatcgcactcattttggctctctctcctggcggttaagctggttttcaaaatagttttgcagtgccgataagacggtcgccattacccagtagattaacgacgcggccagatacatggtaaacacctccagcgttcgcgaggtaattaactgcgcctggcggaacaactccggcacctgaatcgtcgcggcgagcgacgtatctttcaccaggctgataaagctgttgctcaacggcggaagcgcgacgcgagcggcctgcggcaaaatagcgcgacgtagcgtttgccacggcgtcatgccaatgctcgccgccgcttcccattgtcccttgtcgatagccgagatcgccgcgcgcagcgtctcggacgtgtaagccgcggtattgagcgataaaccaatcatcgccgccgggatagggtccagctcaataccaaattgcggcaggccgtaatagatcataaataactgggcgataagcggcgtaccgcgaaaaatcgagatataaaagcgcgccagccagcgaaccggccatagcggagacatccgcatcagcgccagcacaaatcccagcagcagaccaaaaaacataccgccaatactcagttgcagggtaaagacggcgcctttaagcaaatacggcagcgattcaataaccagttggatactttcttgcattcgcgttgattacctggaggttatacatgaggatggtaggcaaacagcgcaggcgccccaccggtgtgaataaagagaatcggcccgtcatcgttaaagcgtttctggctgatgccgtctatcagacccgccatcgctttaccggtatataccggatccagcagcaccccctccaggctcgccagcagtttcaccgcctccatccccgcgtcatttggcacgccgtaacccggggcaaaatagtcatcccataaatggatatccgccgtcgccgtcagcgccagctgaccggcaatagcctgctgcaaggcaatcactttgggtttctgctcggcgacagaacgtgaaacggtcacgccaatcagttcgacatccggcatcagatgttccagcccgacagctaacccggcgtgcgttccggcgctgccggaggccaccaccaccgaagagagcccgacgacctcttcacactgctgggcgatttccagggcgctctctacgtatcccattgcccccagcgcgctggaaccgccgaccggaatcacatagggcctgaacccttgcgcttcaatgcgcgtcgccagcgtttgcagctgcgcatccggatcggttagcgcatcgcacatctcaatttgcgtattaaataaatccagtaacaggcgattaccattcgtcaggtaattttccgcggtggtaccgattggattttccagcaaggcgacgcaatgcagtcccaatttggccgcgactgccgccgtctgacggacatggttcgactgaatcgcccctgcggttatcagcgtatccgccccttctcgcagcgcgtcggccaccaaaaactccagcttgcgcagtttattgccgcccattgcaatgggcgtaacgtcatcgcgcttaatgtaaatctcacggccaagataatcagacaatcgcggcaggtattcgagcggggtcggcgcgccgataaactccaggcgagggaagcgcgttaagtgatgtagtggcattgagcctccggtaacgttgtggtgtgttctttttattatgcacgttgatctaacggaaataaaaaaggcgccgattcacgcgcctccgtttgctgacatagtatgaggttgatattgcccggtggcgcactgcctgccgggcaacgtagaacattattgggtcacgtcagcgccaaaccatttttcagagagcgcttttaaggtgccatctttttgcatttccgcaatggcgttatctaccgccttcagcaagtcttcgttgcctttacgtaacgcaacgccggactcctgacgcgaaaacgcatcaccggtgacggccagcgtacctttggtttttttcaccagatccagcgccgccagacgatcgactaaaatcgcgtcaatacggcctacgcgcagatcctggtattttgtaggatcatcgtcataggtacggatatccacgccctgcacatgttgacgtagccactcttcatagttagtccccagcccaacgccgacttttttgccctgcagatcggcagccgttttgatcgtgccttcattgccttttttcaccagcgcctgaatgccggagacagtataaggcgtagagaaatcatattttttcttgcggacgtctgaaatcgtgacctggtttatcaccacatcaatacgtttagcgtccagcgacgccagcattccgtcccatttggtcggcttcaacgacgctttaacgcccagatgttttgccaacgcctcggcgaaatcgacttcaaaaccggttaatttgccgtcttcgccctgaaagctaaacggcggataggtaccttccagccctaccagcagcgtgccgcgttctttaactttgttcagcaaaccctcatcggcaaagctcttcgcgctcattcccgccaccagcgctacagccattactcccatcagtgcctgacgtcccagcagtgctaatttcatagtaaccccgaatattgccgttaatgaccatagactgtgtcccgccatggcgcatcgtcacgtctcgcgaacctttgggggactcagcctaatgtagaaggtttgccacgtttcaccaacacgactctgctacatcttatgcttttttaatatatatcagaactggcggtaaagggggatttctgtctgggcgcaatctgctgatgcgctttatattgctggtatttacgcagtgcgatacggtaattattggtgctggtttccggcaaccatggcgccaggctttcatcgagaaaaccgtcctgcagcagatcgtgggaaatgttttgctcgctgaggtaattgccaaggcgtcgtaaacgcacgacatattcccgcaccgtgccatggctcatctcggtttgttcaaacaaatactgcttgaaaccgataatatcgaaaaaatcactctgctttttgcagtgcaaatcgccgcaaaagcgacacagcgccacccactccttctgctcccgctgccaggcagcgtcgtcaagtagcatatccagctgtgaaatagcgattttattaacgatcttgccacggcgaaccagcgtaatgcggtcgagcagtttgtgacaatgcgcgcaatgcgtctggctgtgtttaaagtctttaagatagcggctcaaaggccgccttttaggttgctgcaccgtcatgagaactcctggtagtctatacgttgtgcggcacttttcgggtgcgatcatgcgcgacctataacttacccagtttggtgcgtaatcgtttgatggcctgactatgcaactggctgacccgcgattcgccgacttccagtaccgcgccaatctctttgagattgagctcttcctggtaatacagcgttaacaccagttgctcgcgttccggcagcgattcaatcgcatccattacccgctgtcgcaggtcgccctccagcagttgatgtaacgggttttcctgttgatgttcttcagtcaccagttcgatgctatcgccatgctcttcccgccactcatcgtaagagaaaagttggctgttgttggtatcgagcaacatctgacgatactccgcaacagggatgccaagacgttccgccacttcggtttccgtcgcattacgccccagttcctgctccagttgtcccatcgcctgcgccacttcgcgggcattacgccggacgctacgcggcacccaatcgcggctgcgtaattcatccagcatcgccccacgaatacgctgcactgcgtaagtggtaaatgccgttccttgcaaagcgtcatatcggtcgaccgcatttaataacccgatgccgcccgcttgtagcagatcgtccagttccacgctcgccggcaatcgcacctgcaggcgcaatgcttcgtgacgcaccagcggtacataacgctgccacagcgagtgtttatccattacaccttcagcggtatacagtgaattcacgataaacagccctgcgttaaatgagttatcggcatgattatccgtttctacagagggttctatcgaaggaataaggctataaaagaagggttatttcacttatgtaacctgtagcgcctttttagcggctaaaagagcagaataaaatcagccagatagaataaatatcctccggcatagccggaggtttttcagatgcgcctataaggctctcttaccagccgcgccctaacaggcgcatacgatctgacatttgcatcaaacttcgttacttacggcccgtaaacgggctgcccggatacgggatcgataattgctcacccattttatcctcttcaagctggtgctttatgtagtcctgtatcttcgccgtgttcttacccaccgtatcgacatagtaccctctgcaccagaactccctgttcctgtatttgaattttagatccccaaactgctcgtaaagcatcagactacttttacccttcagatatcccatgaaactcgacacactcatcttcggcgggatctccagaagcatgtgaatatgatctgcacaacattctgcttccagaattcgtacgtttttccattcacacaattttcttaatatgctgcctactgccctacgcttctctccatagaacgcttgtcttcggtatttgggcgcgaaaactatgtgatatttacagttccatcgggtgtgcgctaagctcttttcgtcccccattgggacccccttttgatttcttgttgaacttttgcagttgccagaccgcaagatgttttaacaaatcaaaaggggttttaataactggcttaaagctgaaagctttccggaacccccagcctagctgggggttttccatagacaataaacgggatgcgcaaaagcccaccccgaacaaaactatgtcagaagatgaatcatcgacagatcgtcgccagtacgcaccgtttctatatggcgatgaaaattcttcgccacctcgctgttatgctggctgcgggagtgaaaactatacacaatattggtaacgtcatcccactctatacgcccgcgctcatgcacgctggctgccgttaatagcttaataaaggcatattccgccacgataatatacagcgcgcgtaacgggtcgacattcggctggttggggaaattattttcccaaattttatagagaattaaatttctgaaggcccagttcttctgctgctcattcgcctgtaaacagcgcgctaatgaggactcaatatcgctaaccttctgctccattgaaacgccctcttccgccgtcagcacccgcagaagacactggatgtagtgatcgaggataacactgccacgattaagcgggagcgagcggaaatagtcctgcatctgcaataccagcgaggtttttaccttgctatccggcgcgatattcattaactcctgcgccagcacgccggtctgcaactgttcaagtaacgcggcatacacctgttccagttcgcccagcgcggcatcatcaattttggcaaatttctgtgcatacatgacgaatttaatcaacgcatagagcgcggcttccgtactgctgttggcatggttgatcagactcaggcaaaacagattgagtaacttttgctgcgctgggaataacggcgcagtattgaatgtctgctgaatgattgttttttcgctgagtgccattgcgtcaggatcgtttaaaatgcgggacgtcacctccgggcaggcaagactcagagagttacgcacctcatttttataggtatgatgcgcccgcgggaaagaggaacaggtatgacttaatgcctttgcgcctaacgttttttgtacccggcacagacggtcctcatccagataagggcaattccccagcgccgaaggcagcttaatttcgccccagtggctgttgttctttttcagcaggataatatggtcttgcgcgatggtacgaatcgtcgtgtctttactggcgagatattttttaaccgtcgtcttatccagcgtgattttccagcccttacaacagtggtcgcgacaggccgagccagaacaggaaaagcgggtgacaaaggcaggttcagtgacggtgatttctttcattacacaggctccggaattaaaaaaggcagctttcgctgccttgattgtgtaccacgtgtcggtgaatcaatcgccggattaacgcagtaaagagaggacgttttgcggaacctggttcgcctgcgccagaacggaggtaccggcctgctgcagaatctgcgcgcgagacatgttggaaacttcggtcgcgtagtcggaatcttcgatacggctacgggcagaagtcaggttgtttacggtgttgcccaggttggtaatagcggagttgaaacggttctgtaccgcacccaggtcagaacgtaacgtgtcaacctgtgccaaagcagcatcaattttctgcagcgggttttcggtggttgtagcagccgcttccgccagatcaggctgtgctttaaagttgtgaccttcggctttacttgcagcgtaagttttaccaccaatagaaacaacttcggttttgccgtctgcgccacccagtttgtttagtgcagttttggatgtaccgtcatctgcagtgtatttcgtagtattaatacttatggaaccatctttattttgagttgcagaatagtaatcatcgcctaccttaactgctaaaccaccatcaatagttttaccgttattatcagtataagacatcttaacaacagatgctgtgccggtaacacctgctgctgtcaatgcggctttagcctctgtcaaatcagcatttgcaacttgtacatttttcacatcctcagttgctgtcgcaggtagtccacctgtaagcggggaagtcgcaccgccagcaagagtcacctcaccgttcgtcttatcaacggaaacttcataatagccatctttaccagttccccccgtaacggtaactttggcgtaatattttccagtcgtatcatcaaattttaaatcgccatcaattttctggtcagtaccaccaagaccagtagccgaggctttaaaagtactattgtctaaagcaatcgtagtatcggcatatcctgtaacagttgcagccgtatcgctgaccttatatttttgttgcacattcagcgtatccagacccagggtctgagagttgatctgcttcagatcgatatcgatagtttcaccgtcgttggcaccaacctggatggtcagggtgttgtcctgcgccaggactttcacgccgttgaactgagtctggccggatacacggtcgatttcgttcaggcgctgggtgatttcagcctggatggagtcgaggtcagactgggagttggtgctgttagcagactgaaccgccagttcacgcacacgctgcaggttgttgttgatttcgttcagcgcgccttcagtggtctgcgcaatggagataccgtcgttagcgttacgggaagcctgagtcagacctttgatgttcgcggtaaaacggttagcaatcgcctgacctgccgcatcgtctttcgcgctgttgatacgcagaccggaagacagacgctcgatagcggtgcccagagcggactgggatttgttcaggttattctgggtcaacagcgacaggctgtttgtattaatgacttgtgccatgatcttttccttatcaattacaacttgatgttattgggctgttgcccacggtttctcaccgtaacccttgtatcggcacctgaatttcgaactttagaaaatttttcacttcccccgatctttttcttaggcggcgaaatagccgctttatgcatcattattccgcgcattatttttgcaaaattatcattaaactttgcctccagattgccgataacgcgcttaactactgtttgcaatcaaaaaggaagaaggcatggcttcaatttcatcattaggtgtgggatcaaacttaccgttagaccagttgttgacagacctgacaaagaacgaaaaaggacgcttaacgccaattaccaaacagcagagcgcgaattcggcaaagctaaccgcctatggcacattgaaaagcgcattagaaaaattccagacggcaaataccgcgttaaataaagcggatttatttaagtctaccgtggcgtccagcaccactgaagatctcaaagtcagtactaccgctggcgctgccgcagggacttataagattaacgtaacccagcttgccgccgcacagtcgctggcgacaaaaaccaccttcgcgaccaccaaagagcagttgggcgatacgtcggtcacgtcccggacaattaaaattgaacagccgggacgtaaagagccgctggaaattaagctggataaaggcgacacctccatggaggcgatccgtgacgccatcaatgacgccgacagcggtatcgccgccagtatcgttaaggtcaaagagaacgaattccagttggtgcttaccgccaatagcggtaccgacaatacgatgaagatcacggtggaaggcgatacaaaacttaacgatctactcgcttatgacagcaccaccaataccggcaatatgcaagagctggtgaaagcagaaaacgcgaagctgaacgtaaacggcatcgacattgagcgtcagagcaataccgtaaccgacgcccctcagggaattacgctcaccctgaccaagaaagtgaccgacgcgaccgtgacggtaacgaaagatgataccaaggcgaaagaggcgattaaatcctgggtggatgcctataactcgctggtggatacctttagctcgttaaccaaatataccgccgttgagccgggcgaagaagccagcgataaaaacggcgcgctgttaggcgatagtgtggttcgtactatccagaccgggattcgggcacaatttgccaatagcggcagtaattctgcgttcaaaacaatggcggaaattggcatcacccaggatgggacttccggcaaactgaagattgatgatgataagctgaccaaagtactgaaagataacacagccgcagcgcgtgagctgctggtaggcgatggtaaagaaacgggtatcaccaccaaaattgccaccgaagtgaaaagttatctggcggatgacggcattattgataatgcgcaggacaacgttaacgccacgctgaaaagcctgacaaaacagtacctgtccgttagcaacagcatcgatgaaaccgttgcccgttacaaggcccagtttacccaactggataccatgatgagtaagctgaataacaccagtagttatttgacccagcaatttacagctatgaacaagtcctgataacagaggtcaccatgtacaccgcgagcggtatcaaagcttatgcgcaagtcagcgtggaaagcgccgtgatgagcgccagcccgcatcagttgattgaaatgttgtttgatggcgcgaatagcgctctggtgcgcgctcgcctgtttttagaacaaggcgatgttgtcgcgaaaggtgaagcgttaagcaaagccatcaatattatcgataacgggctgaaagccggcctcgatcaggaaaaaggcggtgagattgcgacgaatctttccgagctatacgactatatgattcgccgtttactgcaggctaatttgcgtaacgacgctcaggccatcgaagaagtggaagggttactcagcaatattgcagaagcctggaagcagatttcaccgaaagcatctttccaggagtctcgttaatgacctcaaccgtggagtttatcaaccgttggcagcgtattgcgctgctcagtcaatcgctgcttgaacttgcgcagcgaggtgaatgggatctcttactgcaacaagaggtctcctatctgcaaagtattgaaacggtgatggaaaagcaaactccaccgggcattacgcgaagtattcaggatatggtcgccggatacatcaaacaaacgctggacaatgagcagctcctgaaagggctgctgcaacagcgactggatgaactgagtagtttgatcggacaatccacccgccaaaaatcactcaacaacgcgtatggccgtctttccggtatgttactcgtgccagatgcgcctggcgcctcataatattttcccgtctcgtatgaaaattcttccatactccagaggtcggctaaacgacttctggagcacggaagatgaaaaaccccacgttattgcagtacttccactggtattatcccgacggcggtaaactctggtctgagctggcggaacgtgctgatgggctgaatgatatcggtatcaatatggtctggctaccgcccgcctgtaaaggcgcctccggcggctattccgtaggctatgatacctacgacctgtttgacctcggcgaatttgaccaaaaaggaactatcgcgacaaagtacggcgataaacgccagttactgacggcgatagacgcgctcaaaaaaaataatattgcggtgctgctcgacgtcgtcgtgaaccacaaaatgggcgcagacgaaaaagaacgtattcgcgttcagcgcgtgaatcaggatgaccgcacgcaaatcgatgacaacatcattgaatgcgaaggctggacgcgctacaccttccctgcccgcgcgggccagtattccaactttatttgggactatcactgtttcagcggcattgatcacatcgagaatcccgacgaagacggcatttttaagatcgtcaatgactataccggcgatggctggaacgatcaggttgatgatgagatgggtaatttcgactatctgatgggtgaaaatatcgattttcgcaatcatgcggttacggaagagattaaatattgggctcgttgggtcatggaacaaacccactgtgacggctttcgcctggacgcggtaaaacatatacccgcctggttttataaagaatggattgagcatgtacaggcggttgcgccaaaaccgctgtttattgtcgcagaatactggtcgcatgaagtggataaactgcaaacgtacatcgatcaggtcgacgggaaaaccatgctgttcgacgcgccgttgcagatgaaatttcacgaggcctcgcgccagggcgcggagtatgacatgcgccacattttcaccggcacgctggtagaagccgacccttttcatgcggtgacgctggtcgctaaccacgatacacaaccgttacaggcgctggaagcgccggtagaaccctggttcaaaccattggcctatgcgctgatcctgcttcgtgaaaacggcgtgccgtcagtgttttatcccgatttatacggcgccagctatgaggatagcggcgaaaatggcgagacctgtcgggtcgacatgccggtgattaaccaactggatcggctgatcctcgctcgtcagcgttttgcgcacggtatacaaacactctttttcgatcatcctaactgtatcgcctttagtcgcagcggtactgaagagaatccaggctgtgtggtcgtactttccaatggcgacgacggtgaaaaaaccctcctgctcggcgacaattacgctaacaagacctggcgtgattttctgggaaaccgggatgagtatgttgtaactaatgatcaaggcgaagcgacgttcttctgcaacgcaggcagcgtcagcgtgtgggtcattgaggacgtgtgatgagcgttcccggcggcagagcgctgccgggaagcgaaattacggcagcggcgtcggcagcggcgtcggcagcggcgttttttctaacgcggcggcgcactccggcgtcggacgagcgacccgttgcagcgtcatgccatcatattccagggtattcccgtcgcgctcaatctcatagagctcacgcttaaccgtaacattggttaagtcatcggagagcatggtcagcttgcccggcagagcaataacgcgctgccactggcggcagtccagcgtatcgccttctttagtcaccaccaggctggcgatagcttcagggctcaccagcttacgttgcgggccttttgactgccagtacccttccagaccggccggcgcgggcgttttcaccacatcattatagttttccacctcggcgcatccggccagaaccagcaatgcgccaacgatcgctacttttttcatcattcatcctgcatcagaagaaagaagaattgtggcattaaagccctgacgccgccagcctttccaggcgctggccgcaatttgatccagtcggtattaccgcttattaggtgtaggcaaattctgtgatcggtgtagtatgcgcacttcttgtttcacaccttctgagttcagaggctaaacacatgtcatggcaacacttcaagcaaacctggttaattaaattctgggcgccggcccctgcggtgatcgcagccggtattctctctacctactattttggcatcaccggcacgttttgggccgtgacgggcgaatttacccgctggggcgggcaaattttgcagctttttggcgttcatgccgaacagtggggctactacaagctgattcatctggaaggtacgccgctgacgcgtatcgacggcatgatgatcctcggcatgttcggcggctgtttcgccgcggcgctgtgggccaacaacgtaaaactgcgtatgccgcgcagccgaatccgtatcgtacaggcggtggccggaggcattatcgctggcttcggcgcgcgtctggcgatggggtgtaacctggccgccttttttaccgggatcccgcagttctccctacacgcgtggttctttgcgctggcgaccgctatcggctcctggttcggcgcccgctttacgttgctgccgatatttcgcataccggtgaaaatgcagaaggtctccgcggcttcgccactgacgcagaaaccggatcaggcaagacggcgtttcaggctcggtatgctggtctttatcggcatgattggctgggcgttattaacggcaatgcatcagccgaaactggggctggcgatgctgttcggcgtcgggtttgggctgctgatcgaacgcgcgcaaatctgctttacctcggcctttcgcgatctgtggatctccggacgcgcccatatggcgaaagcgattattttcggcatggcggtcagcgccattggtattttcagctacgtgcagttgggcgttgcacctaaaattatgtgggctggcccgaatgcggtcattggcggactgctgttcggttttggcatcgtgctggcgggcggctgcgaaaccggctggatgtaccgcgccgtagaaggccaggtgcattactggtgggtaggcctcggcaatgtcatcggttcgaccatcctggcttactactgggatgatttcgcgcccgcgctggcgaccagttgggataaagttaacctgctgaatacctttggtccgctgggcggtctgctggtcacctatctgttgttatttaccgcgctgatgttaatcatcggctgggaaaaacgttttttccgccgtgcggggctgacgcctgctaaggaatctgtatgaaaaatatcgtccctgattaccgtctggatatggttggcgaaccttgcccgtacccggcggtcgccactctggaagcgatgccgcagctaaaaaaaggtgagatcctggaagtggtgagcgactgtccgcaatccattaataatattccactggatgcgcgcaatcacggctatacggtgctggatatccaacaggatggcccgacaattcgttatctgattcaaaaataagcgcatactcccgctgtacgttacggcgggagaccttttacggcataaccggcaaaaatctacaacgcataaaagaaatcagacaaggtcgtcttgtgcgccgtggcataaatctattatataacgtataccgttttaattctgtctgagccgatgaaaaatccagggttattttaatcaaaacataaaacaattattattttccgtctacgccataaaagactatcaggtatttatatttttactcactgacatcatcaggtgatgatttatttatgcacagcagaagccaaaaaaatgataaaaattattttcatctccattattggagtcgtctgtcttgccgctgcccgttattcacccgtcacagtggtcaatgcacatccgagcgccattgcccgctgtctcgctgataatctgtccccgtatgggtatatactggatctccatgaaacagatattccaggcattaataaagaatttaccgtgtattatcgcaacggcgcatatattgcaggaacattctggattgcaaactcaatgacaatagcatcagaacgaatagtaggaatgaatggcgttagtaaacaggcgtaccctatttttaataaatccctgcaacaatgtgcaacccgcttatcaataaaatgagcgcgcctcgcaaaaataagcccacataatcacgcactggttgcatgggcgtcgcgtcccccgccgctgacgtaggtaagcgcccgggagttcgctgcggatgtgttgtcagccctggcttaaacctgcatggacatgacttcctgatacgcggcgaccagcttgttgcgcacctgaatccccatttgcatagagacggacgctttttgcatatcggccatcacgtcattaagcgcaatgcccggctcacccagagtgaatttttccgcctgaacgcgcgccgccgcttgtctgtcgctaatacgatccagcgcagcatgtagctggccggcaaaactcaccgtcgactgcgagtgcgtgtcttgcccgcgcgcggccatcgccgtcgcctgtaactggctaataaccccttcaatcccctgtattgctgccatgctattcccctggatgattttttacgcagcagagattaccagtttgtcaataagataaaggcgttaaataacgataaaaaacctcggtttttagcgcatagaaaaattcgaaaccacaaataatgagaccgtcaatttttcgagtttgctgacccgggagtgagtcttgttccactttgcaaaaaacgccgtccacgatcagtcacgaggtgcgagatgagtgcgactgcatcgactgcaacccaacctaaacctctcgagtggcttaatcgcctacgcgcgaatccccgaattccgttaattgtggcgggttccgctgccgtggcgatcgtcgttgcgatggtgctgtgggccaaaacgcccgattaccgcacgctatttagcaacctttccgatcaggacggcggcgcgatcgtcgcgcagttgacccagatgaatatcccctatcgctttgccaatggcagcggcgcgattgaagtgcccgccgacaaagtgcatgaactgcgtctgcgtctggcgcagcaggggctgcctaaaggcggcgcggtaggctttgaactgcttgatcaggaaaaattcggtatcagccagttcagcgagcaggtgaattatcagcgcgcgctggaaggtgaactggcccggacgatcgagacgctggggccggtaaaaagcgcccgcgttcacctggcgatgccaaagccgtcgctatttgtgcgggaacaaaaatccccttccgcctccgtcaccgtcacactggaaccgggacgggcgctggatgaaggacaaattagcgccgtggtacatctggtttccagcgctgtcgccggtttgccgccaggaaacgtcactctggtcgatcaatccggtcatctgctcacgcaatccaataccagcggtcgcgaccttaatgacgcgcaattaaaatttgctaatgatgtggaaagccgtatccaacgccgtatcgaagccattctgtcgcctatcgtcgggaacggtaatgttcacgctcaggtaaccgcccagttggattttgccaataaagagcagacggaagagcactacagcccgaacggcgatgcgtcgaaggccactctgcgttcacgtcagttgaatattagcgaacaggtaggcgcgggctatcccggcggcgtgcctggcgcgctgtcgaaccaaccagcgccgcctaacgaggcgccgatcgccacgccgccgaccaatcaacaaaacgcgcagaatacgccacaaaccagcaccagtaccaacagtaacagtgctggcccgcgtagtacacagcgtaatgaaaccagtaactacgaagtggaccgcaccattcgtcacaccaaaatgaatgtgggcgatattgagcgtctctccgtggccgtcgtggtgaattacaaaacgctggcggatggcaaaccgctgccattgaccgccgatcagatgaaacagatcgaggatttaacccgtgaagcgatgggtttttctgataaacgcggcgatacgctaaatgtggtgaattcaccgtttagcgcagtggataacaccggcggcgaactgcccttctggcaacagcagtcctttatcgatcagttgctcgcggcaggtcgctggttgctggtgctggtggtggcctggattctgtggcgcaaagcggtacgtccgcagttgacgcgccgcgttgaagaagcgaaagcggcgcaggaacaggcgcaggttcgccaggaaaccgaagaagccgtggaagtacgccttagcaaagacgagcagctccagcaacgccgggctaaccagcgtctgggcgctgaggtgatgagccagcgtattcgcgaaatgtcagacaacgatccgcgcgtggtggcgctggtcattcgccagtggatgagtaacgatcatgagtaatcttagcggtaccgataaaagcgtcattttgttgatgaccattggcgaagaccgggcggcagaggtgtttaaacacctctccacccgcgaagtacaggcgttaagtacggcgatggctaacgtgcgtcagatctccaacaaacaactgacggacgtactatcagagtttgagcaagaagcggagcagttcgccgcgctgaatatcaacgccaacgaatacctgcgctccgtactggttaaagcgctgggcgaagaacgcgcctccagcctgctggaagatattctggaaacgcgcgataccaccagcggtatcgaaacgctcaactttatggaaccgcagagtgccgccgacctgattcgcgacgaacacccgcagattatcgccaccattctggtccacctcaaacgcagtcaggccgccgatattctggcgctgtttgacgagcgtctgcgtcatgatgtgatgctgcgtatcgcgacatttggcggcgtacagccggcggcgctggcggagttgaccgaagtgctgaatggcctgctcgatggtcagaacctgaaacgcagcaaaatgggtggcgtaagaaccgcggcggaaattatcaacctgatgaaaacgcagcaggaagaagcggttattaccgctgtgcgcgaattcgacggcgaactggcgcagaaaatcatcgacgagatgttcctgttcgaaaatctggtggatgtggacgatcgcagtatccagcgtctgctgcaggaagtggattccgaatcgctgctgatcgctctgaaaggcgccgaaccgccattacgcgagaagttcctgcgcaatatgtcccagcgcgccgccgatatcctgcgcgacgaccttgccaaccgtggcccggttcgtctgtctcaggtggaaaacgagcagaaagcgattctgcttattgtgcgtcgtctggcggaaaccggcgaaatggtgattggcagcggcgaggatacctatgtctaatgaattgccgtggcaagtctggacccccgacgatctcgccccgccgccagaaacttttgtgccggttgaggctgataacgtgaccttgacagaagatacgccggagcccgaactcactgccgaacagcagctggagcaggagctggcgcagctaaaaatacaggcccatgaacaaggttataacgccgggctggcggagggacggcaaaaaggacacgcgcagggataccaggaagggttagcgcaggggctggagcaaggacaagcccaggcgcagacgcagcaggcgccgattcatgcccgtatgcagcagttagtgagcgagtttcagaacacgcttgacgcgctcgatagcgttatcgcctcacggctgatgcaaatggccctggaggccgcacgtcaggtcatcggccaaacgccggcggtggacaactcagcgctgattaaacagatccaacaactgttgcagcaagagccgctctttagcggcaagccgcagttgcgcgtgcatccggacgacttacagcgggtggaagagatgctgggcgccacgctcagtcttcacggatggcggttacgcggcgatccaacgttgcatcacggcgggtgtaaagtctctgccgatgagggcgatctggacgccagcgtcgccactcgctggcaagagttgtgtcgcctggcggcgccgggagtgctctgatgaccacgcgcctgacccgctggcttaccgcgctcgacaactttgaagccaaaatggcgttattgccggcggtgcgtcgttatggacgtttaacccgcgccactggcctggtactggaggccaccggtctccagcttccgctgggcgccacctgcattattgagcgccaggacggccctgaaaccaaagaggtggaatcagaagtcgtcggttttaacggccagcgtctgtttctaatgccgctggaagaggtcgaaggcattctgcccggtgcccgcgtttacgcccgtaacgggcatggcgacggtctgcaaagcggcaaacagttaccgctcggcccggccctgcttggtcgggtgctggatggcggcggtaaaccgctcgacggactgcctgcgccggatacgctggaaaccggcgcgttaatcacgccgccgtttaacccgctacagcgaacgccaatcgaacatgtgctggataccggcgtacgcgctatcaacgcgttgttaaccgtagggcgcggtcagcgtatgggactctttgccggttccggcgttggtaaatcggttctgcttggcatgatggcgcgctacacgcgggcggacgtgattgtcgtgggacttatcggcgaacgtggccgcgaagttaaagattttatcgaaaatattctcggccccgacggtcgcgcgcgttcggtggtgatcgccgccccggcggatgtctcgccgctgctgcgaatgcagggcgccgcctatgccacccgcatcgccgaagactttcgcgatcgcggacagcatgtgttgctgattatggattcgctgacgcgctatgcaatggcgcagcgtgagattgcgctggcaatcggcgaaccgccagccaccaaaggttatccgccctcggtgttcgcaaagctgccggcgctggtcgagcgtgccggtaatggcatccacggcggtggctctatcaccgcgttttataccgtgttgaccgagggggacgaccaacaagatcccattgccgactcggcacgcgcaatcctcgacgggcacattgtcttgtcccgccgtctggcggaggccgggcactatccggccattgatatcgaggcgtcaatcagccgggcgatgaccgcgctcattaccgagcagcactatgcgcgggtacggctatttaaacagttgctttccagtttccagcgtaaccgcgatctggtcagcgtcggcgcctatgccaaaggcagcgatccgatgctcgataaagccattaccttatggccgcaactggaagcgtttttacagcaaggcatttttgaacgggccgactgggaggactctctgcaggcgctcgatttaattttcccgacggtgtgataaagcaggagggcgacgatcatggcacaacatggcgctctggaaacactcaaagatctggccgaaaaagaggtagatgacgcggcgcgtttactgggcgaaatgcgtcgcggctgccaacaggcggaagaacagctcaaaatgctgatcgattatcagaatgagtatcgcagtaatttgaacaccgatatgggcaacggcatcgccagtaatcgctggatcaactatcagcagtttattcagacactggaaaaggcgatagagcagcatcgcctccagcttacgcagtggacgcaaaaagtcgacctggcgctgaagagctggcgtgagaaaaagcagcgacttcaggcctggcaaaccttacaggaccgacaaaccgcggcagcgctgttagctgaaaaccgcatggatcagaaaaagatggatgaatttgctcagcgtgcagcaatgaggaaacccgaatgatcaccctgccccaactgatcaccaccgataccgacatgaccgcgggtctgacgtcaggaaaaaccaccggttcagccgaggactttctggcgctcctggcgggcgcgttaggcgcagacggcgcacagggcaaagacgcccgcatcacgctggccgatttacaggcggcaggcggcaagttatcgaaagagctactgacccaacatggcgagccgggccaggcggtgaagcttgccgacctgctggcgcaaaaagcgaatgcgacggatgaaacgcttaccgatctgacacaagcgcagcatctactgtctacgctaacgccatcgttgaaaaccagcgctctggccgcactgagtaagacggcgcagcatgatgagaaaacgcccgcgctgagcgatgaggatcttgccagtctgagcgccttattcgccatgctgcccggacaacctgtcgcgacgcctgtcgccggagaaacgccggctgaaaatcacatcgccttgccgtcactgttacgcggcgacatgccatcggcgccgcaggaagagacacatacgctctcttttagcgagcatgaaaaagggaaaaccgaggcgtcgcttgcgcgcgccagcgacgatcgcgccacggggccagcactgacgccgctggtagtcgctgccgccgcgaccagcgcgaaagtggaggtggatagcccgcccgcgccagtaacgcatggcgcggcaatgccgacgctcagcagcgccacggcgcaaccgctacctgtcgcctcagccccggtactcagcgcgccgttaggcagccatgaatggcagcaaacgttcagtcagcaggtcatgttatttacgcgtcagggacagcaaagcgcgcagcttcgattgcatccggaagagttaggtcaggtgcatatttcgctcaagctggatgacaatcaggcgcagctccagatggtatcgccgcacagccatgtccgcgccgcgctggaagccgccctgcccatgttgcgcacccagttggcggaaagcggcattcagttgggacaaagcagtatcagtagcgaaagctttgccggacagcagcagtcttcgtcgcaacaacagtcttcccgcgcccaacacacggacgcgtttggcgctgaagatgacatagcgttagcggcgccggcctcgcttcaggccgccgcgcgcggcaatggcgcagtggatatcttcgcctaacgccagaggtagcatgattatccgcgtcttttccacgctttgtcgtggacaggacacgggataatcagccaataagcagtaccgaaacaggaagcccgtatcagatgactgactccgcgattaacaaaaagagcaaacgctcgatttggatacctttgctggtgttgattaccctcgccgcctgcgcgaccgccggttatagctactggcgtatgcagcagcaaccgaccacgaacgctaaagcggaaccggctccgccgcccgcgccggtattttttgcgctggatacgtttaccgtcaatctgggcgatgcggatcgcgtgttgtatatcggcgtgaccctgcgtctgaaagacgaagcgacgcgcgcgcgattaaatgaatatctgccggaagtgcgcagccgtctgctgttgttgttttcccgtcagaatgccgccgagctctcaacagaagctggcaaacaaaaactgattgccgccattaaagagacactggccgcgccgctcgttgccggacaaccaaaacaggtcgtcactgacgtgctttatacagcttttattctgcggtaacgatatgggcgatagtattctttctcaggctgaaatcgatgcgctgttgaacggcgacagcgacaccaaagacgaacccactcccggtatcgcaagcgatagcgatattcgcccttacgatcccaatacccagcgtcgcgtcgtgcgtgaacgcttgcaggcgctggagattattaacgagcgtttcgcacgccagttccggatgggattatttaacctgctgcgccgcagcccggatattaccgtgggtgccatacgtattcagccgtatcacgaatttgcgcgtaacctgccggtaccgaccaacctgaacctgatccacctgaagccgctacgcggcaccgggctggtggtgttctcgccgagtctggtgtttattgccgtcgataacctgttcggcggcgacggccgttttccgaccaaagtcgagggccgcgagtttacccatacggaacagcgtgtcatcaaccgtatgctgaaactggcgctggaaggctatagcgacgcatggaaagccattaatccgctggaagtggagtatgtgcgttccgaaatgcaggtgaaatttaccaatatcaccacctcgccgaacgatatcgtcgtcaatacgccgtttcatgtggagatcggcaatctgaccggtgaatttaacatctgtctgccatttagcatgatcgagccgctgcgtgagctgctggtgaatccgccgctggaaaactcgcgccatgaagatcagaactggcgtgataacctggtgcgccaggttcagcactctgaactggagctggtggccaattttgccgatattccgttacgtctttcccagattttgaagctgaaacccggcgatgtactgccgattgaaaaacccgaccgcattattgctcatgtggacggcgttccggtactcaccagccaatatggcaccgtaaacggacagtatgcgctacgcgtagaacatttgatcaacccaattttgaattcgctgaatgaggaacagcccaaatgagtgacatgaataatccgtccgatgagaatactggcgcattggatgatctgtgggctgacgcgttaaacgagcaaaaagcgaccaccactaaaagcgccgccgacgcggttttccaacagcttggcggcggcgatgtcagcggtgctatgcaggatatcgatctgattatggatatcccggtcaaactgaccgtagagctgggccgcacgcgaatgaccattaaagaactgctgcgtctgacgcaggggtcggtcgtcgcgctggacgggctggcgggcgagccgctggatatcctgattaatggctacctgattgcccagggtgaagtggtcgtcgtggcggataaatacggcgtacgtatcaccgatattattacgccatccgagcgtatgcgtcgtttgagtcgttaatgatgaagacagaagccacggtttctcagcccaccgcgccagccggatcgccgctcatgcaggtgagcggcgcattaattggcattattgcgctcattctggcggcggcctgggtgattaagcgtatgggattcgcgccaaaaggaaatagcgtccggggactgaaggtgtcagccagcgcctcgcttggcccgcgcgaacgcgtggtgattgtcgaggtcgaaaatgcgcgcctggtactgggcgtgaccgcctcgcagatcaacctgctgcacaccctgccgcccgcggagaatgacacggaagcacccgttgccccaccggcggatttccagaacatgatgaagagcttactcaagcgttccgggagatcctgatgcgccgtttgttattcctttctctggcgggtctgtggctttttagtcccgccgccgctgcgcaactgccggggcttatcagccaaccattagcgggcggaggccaaagctggtcattatccgtccagacgctggttttcatcacctcgctgacgtttctgccggcgattttactgatgatgacgagcttcacgcgtatcatcattgtttttggcctgttgcgtaacgcgctgggcacgccctcggcaccgccaaatcaggtgttactcgggctggcgttgtttttgaccttttttattatgtcgcccgtcattgacaagatttacgtggatgcttaccagccgtttagcgagcagaaaatttctatgcaggaagcgctggataaaggcgcgcaaccgttacgcgcgttcatgctgcgccaaacccgcgaagccgatctggcgctgtttgcccgtctggccaatagcggtccgttacagggaccggaagcagtaccgatgcgtatcctcctgcccgcttatgtcaccagcgaattaaagacggcgtttcagatcggttttacgattttcatcccttttttgattatcgacctggtgatcgccagcgtattgatggcgttggggatgatgatggtgccgccagcgacaatcgccctaccgtttaagctgatgctgtttgtgctggtcgatggttggcaattgcttatggggtcgctggcccaaagcttttacagttagaggcgcaaaatgactcctgaatccgtcatgatgatgggcaccgaggcgatgaaagtcgctctcgccctggctgcgccgctgttactcgtcgcgctgattaccggcctcattatcagcatcttgcaggccgcgactcagattaatgaaatgacgctgtcgtttatccctaaaatcgtcgcggtattcatcgcaattatcgttgccggcccgtggatgctcaacctgctgctggattacgtgcgcactctgttcagcaatttaccttatatcatcggataaacagaacgatgatccaggttacaagcgagcaatggctatactggctgcatctctatttctggcctttgctgcgcgtactggcgctgatttcaacggcgcccattctcagcgagcgcgctattcccaagcgggtaaaactggggttgggaataatgattacccttgttatcgcgccgtcgctaccggcaaacgatacgccgcttttttctattgccgccttatggctggcgatgcaacaaattctgatcggtattgcgctgggatttaccatgcaattcgcctttgcggcggtgcgtaccgcaggtgagtttatcggtctgcaaatggggctttcctttgccaccttcgtcgacccgggcagccacctgaatatgccggttctggcgcgtattatggatatgctcgccatgctactgtttctcacctttaatggccatttgtggcttatttcgctgctggtcgataccttccacaccctgcccatcggtagtaacccggtgaacagtaatgcatttatggcgctcgccagggccggagggctcattttcttaaacggactgatgctggcattgccggtcattaccctcctgcttacgctcaacctggcgctggggctattaaaccgcatggcgccgcagctctcgatatttgttatcggtttcccgcttaccctcaccgtcggcattatgctgatggccgcgctaatgccattaattgcgccgttttgcgaacatttattcagcgaaattttcaatttgcttgctgatattgttagcgagatgccgataaataataacccataatttttatcctgttttactaaggtttatccgaaaataaattttaaaaaacattcaccaggatatatccactgccccttatttgtttttacttcactcacataacgcaacattcactttactttaagatgattcctggcaaattatatgtaactttacgggatagtaagttcgcctgaaaaaccgcgtaagcgttgtctaaggtgactattcgtgttccgtctgattatggtgagttattcaggtaaggggaattatcgttacgcattgagtgagggtatgccatgtcaacgattattatggatttgtgcagttacacccggctagggttaagcgggtatctggtcagcagaggggtgaaaaaaagggaaatcaacgacatcgaaaccgttgacgaactcgctatcgcttgtggcgcgcatcagccttcggtggtgtttattaatgaggactgtttcattcatacgccttcagacagtcaacaaataaagcaaatcattaatcaacatcctgacacgttatttattgtttttatggcaattgctaatgtgcattttgatgaatatttattagtaagaaaaaacttattgattagctcgaaatcgattaaacctgactcgctggatacccttcttggcgatattctgaaaaaagagtcgggtatttcaggaaccataaatttaccaacattatcgttaagtcgaactgaatccagcatgttgcgaatgtggatggaaggtcagggaaccattcagatttctgacagaatgaatattaaagcaaaaacagtatcctcccataaggggaatataaaaagaaagataaaaacgcataataaacaagtgatctatcacgtagtacggctgacagataacgtcactaacggcatttttgttaacatgcgctgagacatccggactggcaatgtacctccagtccggctcaattagtcctgctccgccttctcgacaaaaataccatcctggtgacctgactcattgaagaaccagatgccgagcgggtaatcctccagcgaaaccaggtacattgtgccttcactaaattcttccactgccagtaccacgcccggtcggcggggaccgccgtccgttttaacggttacccgatcattcaccttcatcattttcctcctgtcgctttgtgccagtgtagaacaattttctgcgtctgacagcgccttgccggcgtgtttgctggttttctcaacggtctatacttaggctgtcaggaacccgtgaggtggtgaagatgaaaacggcaaaagagtacagtgatacggccaagcgcgaagtgagcgtcgatgtagatgcgctactggcggccatcaatgaaatcagcgaaagcgaggttcaccgtagccaggaagatcctgagcgggtgagcgtagacggacgggaatatcatacatggcatgaattagctgaagcattcgagctggatattcatgattttagtgtaacagaagtaaaccgttaaaaatggccgaaaaaaatcccggccctacgggtcgggatcaaacttgcttatgcaagaagcacttgaaaattcgttacaccaggaaatctgatgtgagatttaccttatctgcaatttttttgcatgacaagtaaatattttttacatgaatgattaagcacgctaatagttcggtagcaaaagtgtgacaacgcatgtgctgcctggaagcgacgggatcggttccagttagcgttcgacttctttcgggtgtgctttaggacttttcctggaaataagcccgccgttgcaacggaaaatgaggaaaaaatgctctcaatccatgaccccttgctgatttttaccgatctggacggcacattgctgaacagccacacttttgagtggcagcccgcggccccctggcttacacgcctgcatgaaagcggcgtgcccgtgatcctctgtagcagtaaaaccgcggctgaaatgctccagctccagacgacgttaaatctacagggactgccgctgattgcggaaaacggcgcagtgatccaactggacgttcattgggaagaccatcccaactatccccgtctgatagccggtatttctcacaacgaaatccgcctcgtcctgcataagttgcgtgaaaaggaacagtttaagttcaccacgtttgatgacgttgacgatcaggtgataagcgaatggacgggcctaaaccgggcacagtctgccctaacccgtctgcatgaagcgtcggtgtcgctgatctggcgcgatagcgatgaacgcatggcgcagtttgtcgcccgtttaaatgacctgggactgcaatttgtccatggcgcccgtttctggcatgtgctggacgcctccgccggtaaagatcaggctgccaattggctgattgaagcatatcgtcggcagtggcgcgcgcgtcctctgacgttggggctaggagacggccccaatgatgcgcccttactggatgtgatggattatgcggttgtcgttaaagggctaaaccgggagggcgtacatttgcgtaacgacgatcctcagcgcgtctaccgtagccagaacgaagggccggatggctggcgcgaaggaatggactatttcttttcccgctcctgagtcgcgtcgctggcgcaaatacggttacgtccggactgtttggcgtaataaagccgtttgtcggccagcgactgcaactgctcaaaatcatagtcgccgtattcctccgcgctactgatccccattgacgcgctgatacgaagcgtcgtgcttttcgtcaccagaatctctttgtcattaatgcgctggcgtatgcgttcggcaatctgcagcgcctgcgctttcgtcgcgccgggcagcacgatacaaaactcttcgccccctacccgtccggcgatgtcgtgcgctcgaatggtgctgccaatgagcccagcggcatgggacaacacgcgatcgcctgcctgatgaccaaagcgatcgttaacgcttttaaaataatctaaatccagctgtatcacagaaaatggctggcgggcttcccggtagcgctttgccagcctggacgctttttcaaacagcgcgccacggttatatagccgggtcagcggatcgtgccatgcctgccattgcagcgaattttgcagaacaaacatgtttttgaccatatgtcgaataacgccccaggagatcaacagcatcgccgtaaaaagcccccataacagcgtcagcgcgatactaatgctgccaaaattcccttgtatgccttcacgtaatgtatgcacgcgcagcaggatgccatcaaaatgatccagccgctcccagcttacataatgcgttcctaaacgcagcccgcccagggtatctttttctatttcacgcgccagtaaggcgcgctcacggtcatttaacgtattcgcggtttgttgttccggcgcggagtccgtcaacaaacggagatggttatcgtatagctgatattccccttcaatatccttttcggccgcatcgcgcaggaaccgctgtaatgacgcgacgggaatatccattgccagtacgccataccagtaattatcgtgatccagcggtagactggctgtcacttttttctgctcgtcagtaacatagggctgtgcggaggtaaaccaccgcacgccgcgctgtgagttacgccgttggctttgctcgataaaccatggctgagtcacgtactgatagtaacgggagacaatatcgctaccgtacgccgtagggagagttgagaggtaaaaccctgagcgagaaacatacatcgtctccagcgccagcatggctgatgagcgcgccagacgcgccagataccctaactccagcgtggcggttaattcatttgccaggtcacgactctcccgcgaaagaagcgtcgtccgggcgacaaattgatcggaaacgccatataacggcaatgtccgccgcttatccaactccaattgccagaaatgtctgacgcgtcgttgctcaaactgcgtcaccgcgctttgcaatgcggaaaaagccagcggcgccaccagcgcttcatgcataccgttgcgtaaaaagatcaacctgtccatgttgaattgcagttggcggtcaaggacattcgcgacgctccccagatgattgcgctgactggcgacatacgcgtctttcagtatcatcacttccctccaggtaagtagcgtcgagaacagcatcacgatcagaaaacaggtgttgacgacatgaccgggaccaaaacgccgcgccagctttttaaaccagccttgattgtctaacagtgtttcgtgcggcaccctggtaactcctggttattgatacaactccccctgatggcttacggtagccagacctcatcaagggataccactcaatcctggcataaccaggtagcagcatgtcgcagcgcgacgactctttttctccacagcaaaacgcccggcattaaccgggcgttttgtcatcgggcttcgtcccgcacgcgcctttccttgcctggcacgagctcattctcatggaatgcctcccgctttacgccaaaaccatcataccagcgacactctaccattccgctggaataaccggtgacgatcatccggggcccaccctctttcacggtaacttcctcactgacagaaaagaccatacctgcctcctgtatcagatgaaacgctttcaccttagacgaggatggacaattttgcataattcattgtagaaaatcagtgcgaaacaccgcgaattttcgccacacctttcaccagcgccaccacaatggcgccgataataaagccgagcaccagattcagccccgcagggatcgtatgcgccatgaaagccccctgctgctgcgcaaaatgttcaatggcatggtgtagcggcgcaataccgtgtacgacaattccgccgccaaccagaaacatcgccagcgtaccgacaatggataatgctttcattaaccagggcgcgataatcagtaatcctttaccgacgccctgcgccagcacgctacgcttttccgccagccagtaccccatatcatccagtttgacaataatacccaccaggccatacacgccaatggtcacaaccaacgcaatccccgccagtaccaacacctgattaagcagcggcgcctgcgcgacaatccccagggtaatggccacaatttcagcggacagaatgaaatcggtacggaccgccccttttactttatctttttcaaaggccaaagggttttgcgcagccagcgcctcaagacgtttttgccgctccgccgggtcttctttgtgttttcgcgcctcaaaggtatgcaggactttttctaccccttcaaagcagagaaacgcgccgcctaacattaataaaggcgtaatggcccacgggataaatgcgcttatcaacagcgccaacggcaccagaataaccttgttgattaatgatcctttcgccacgctccataccaccggcagctcgcgattagcgcgaacgccggtcacctgctgcgcattgagcgacaggtcatcccccagtacgcccgcggtttttttcgcggccaatttgcccattaccgaaatatcgtccagcagcgtggcgatatcgtcgagtaatgtcagtaagctacttcctgccaaaatgatttcctcggtcttttcttctaagacgttaagtatgtagcaaaacgcgcaatgccgaaaccggcggcgcgggtcaacgcctttttattccaaaaggacaattataatgctcgccagcataataattttgacgtttactatattcaccctttttatttcaccgtgagtgattatgcgtttccggcagttattacctctttttggcgcgctttttgccttgtacatcatttgggggtctacctattttgttatccgcataggcgttgaaagctggccgccgctgatgatggcaggcgtacgttttctctcggcggggatgttgctcatggcgtttttgctgttgcgcggcgaaaaacttccgccgctgcgccagaccatcaacgccgcgctgattggtctactgctgctggcggtgggtaacggtctggtgacggtggcggagcatcaaaacgtgccatcgggcattgctgccgtcgtggtcgccactgtcccgctatttacgctgtgctttagctacttttttggtattaaaacgcgcaaattagaatgggtggggattgccattggacttgccgggattattctgctgaacagcggcggcaacttaagcggcaatccgtggggcgcgattttgatcctgataggttcgatgagctgggcatttggttccgtttacggctcgcgcatcgccctgcctgtgggcatgatggcgggtgcgattgaaatgctggcggcgggcgtggtattgctttgcgcggcgtttctttccggcgagaagctcgccacgctgcctggtttatcggggtttatggccgtcggctacctggcgttgttcggttctattatcgccattaatgcctatatgtacctgattcgcaacgtcagtccggcgctggcgaccagctacgcctatgtgaatccggttgtcgccgtgttacttggcactggcctgggcggtgagaggttatcgcccgttgaatgggccgcgctgggtgtgattgtgtttgccgtagtgctggtgactctgggtaagtacctgtttcctgtcaaggcggtggtcacgccgtgtaaaacggaagattcacgccagtagatgaatcccctgggtgtcgatctgcgcgctggcgccgccgccgcagatccactcttccaggcgctccgccaacgccgcgtcgctcaatttcgctcgcccgcgcaaggcgcactcccagacgatcagtacccgccagccaagcgcctgtaaacgctgaatatcgcgctcatcgcgctcaacgttcttaccgattttttccagccagaaagccgttcgcgtggccggcactttgaacagataacagtggtgatgatgccaaaagcagccgtgagtaaaaatcacacaatcataatcattcaccacaaagtccggcttgcccggtaatgtcgcgtcctgagtatgaaacgtaatcccctgtgcgcttaacaggccagcaagacgtttttcaatagccgtatcgcgggtcgctatcgcgcgcatatttttactgcgcgtggctttatcgtgaacgtccgccatctaccgtctctctctgacgcaacgtcaccgcctggtgaattttgggttccaacagctttgctaccgcagcaaataccggcaccaccacggagttgccaaactggcgataggcctgcgtatccgagacaggtatcctgaactggtacgtttgcggcgcctcaaatcccattaaacgcgcgcactctctcggcgtgagtcggcggggacgatgttgttggttgccagcatcgtcgaaattcacttcgcctttcgccatatcccaaccacgatcgatcagaatttcggcaccatctttgtagtagcgagcagataacgtgcgcgccacactttccggattgtcaggataaaccatgccatagccaaaaccgtttccccgcgcctggtgctttttcgcgtagcgatataaatatttccacagcaccggcgtcaggatatatttggcttcgacgacgggctccagcagttctgccagcgtcggacggcgcggtggataacaacgggcgatattgcgtaacgtaaaatcggttttcaggtttaaatcgcgacggaatcccaccaacacaatacgttcccgatgctgaggaagaaagtgctgcccgtcgataattttcggatcgtccgggccattgtcagcggcatccgccacgtcatatcccagttcatcaagcgtttgcataataatgcggaaggtgttgccctggtcgtgacttttaaggtttttcacgttttccagcacaaacagcgcggggcggcgggcgtcgataattcttacgacatcaaaaaataacgtcccctgagtctcgcaggcaaagccgtgggcgcggcccagcgcatttttcttggaaacgcccgccagagaaaatggctgacagggaaagcccgccagcaggacatcatgttgcggaatatgctggcgaatgtgttccgccgcctcatcatcgctgaccccttcccggtggctcaatgtgatatcgcggatatcttcattaaagcgatgttgcagcggatcgcaaaaatagttcgctttatatgtccgtaccgcgtgcttattccattcgctggtaaacacgcactgtccgcctatcgcttcaaatccgcggcgaataccgccgatgcccgcgaagagatcgataaaacgaaaggcgtaatgtggatgatgcgctggcggcgtcggcaactctgttttaagacaggtgagttcattgtcgctcaagcgatgccatgccgcgttcatcattacgcgcttgaagatggccgggctccagtgctgttcgcccaggccgttaaggtgcgccaccagcgttttaacatcgtagatttccagcaattgactcagcatcgcctggagctcgcttccggcgtcgtcggcgatgaggttccgggcgtgtgttactgaaatattttcctgcatacatttaaccggccaaaaataattgccgacagactaacataaaatgacgcggtttacgtttcagcgacaggggttactgatgcgtagcaaacatctggatgaccgcatcatcccgtgtttcatagtcgcctttcagctcagcgctcagtttcgccatgtacgacaccagaaaatccgcattacgctgcgccaggtacttgccccgttcggtctgcatcgtcagcggcagtttcagcagtttggtttgaaaatggtcgagcgcgaattgcttatcgttaagaggccgtctgtcggcaaagggatcgtcggcatcaaataacgcgacgcccagcgcgccggagaccgcgaagacccgcgccagaccaatggcgcccaacgcctccagcctgtctgcatcctgcacgatttttgcctctggcgtggtaggcgcaatttttgcgctgaagctatgcgcttcgatagcatgacaaatgcccgccagtttttctgccggaaagtcaggaaaatcccgcagaaaaatacgccgggtttctgccgccgccagaatggaagaacgatgccgctgcggatgatttttcgccaggctgacgatgtcatggaaataacatgccgatagcaccaccagccagtcgacaggactgttttcccccagcgtttgcgcggttgcccaaacacgacgaaaatggaagatgtcatgggcggcatcctgttcctgatggtggtgacgtagccagtcttcaaactgcgattgccagtatcctgagtccatacgccctctctttatagcagaccatttttattacatgcctgagcacagggttcgctatcctgacatatccgccaccactttacatccctgcttacttgcgcgtttctggcttagtgtcggcgggataagccctgtttttgcgaggccgggtataccaggcaatactccccagaataagccagacgacgcccagcgaaagcgcgttaagccatttttccgttgcgctgccaggagtgctgattgggccgagaaccggctcggtttgtatggcggacatcagccacacgcaacgcgccatcgcccagatgaagtagccgcaaaaggtataaaaaacccataacgctaatttgccgcccatgctacgggtggcgttgtcctccctggtactcaaactttactccgcttttgtgatgtaagtcatatgacattaattacattataatgtgatattaatcacatttcgactatggaatacctcatccacctgttctggctattcattccacaaatagtttattctcagttaatgttacgtctggcgctgaacctgctgttaaataagggaatggtgattgaatcgcactctgatgcagaataacctataaccagaacaacttatttttacgcaccgcgatagcgttttattttatcagcattaagtgtcagaatgattcggttattagccttttatcatttattttatcattacccacattaccggcatttatgccggttttttttatgttttttcataatcaaagcatcaaatacatataaaaaacaaattatattcacaccaacaaccatcaaataaaaaaacataacccattgataaaaaatgataattatagaatatatattcttagttacttatatagtctgtattataaaaaaccaaacagaaacaaattgaaatattttaaatacctttgttacatgttattttttaaattccatgaacttcatagaatagtatcaatttgtagttttgttgaagtggctacatattcatataaattattatcataagggaatacataatgaacagaaaagttctggcactgcttgtcccggcgttattagtggcaggcgcagcaaatgcggctgaagtttataataaaaatggcaacaaactcgacctgtacggcaaagttgatggtctgcgttacttctctgacaatgcaggcgacgacggcgaccagtcctacgcccgttttggctttaaaggcgaaacgcagattaacgatatgctgaccggctatggtcagtgggaatacaacattaaggtaaacaccaccgaaggcgaaggtgcaaactcctggactcgtctgggctttgccggtctgaaattcggcgagtacggctctttcgattatggccgtaactatggtgttatctacgacattgaagcctggaccgatgcgctgccggaattcggcggtgacacttatacccagaccgatgtctatatgctgggcagaaccaacggcgttgctacctaccgtaataccgacttcttcggtctggtggaaggcctgaacttcgcgttgcagtaccagggtaataatgaagatcctggcgcaggcgaaggaacagccaacggcagcgatgcagatagtggtactcgcaaactggcccgtgaaaacggcgacggtttcggtatgtctacctcctacgactttgacttcgggttaagcctgggtgcggcctactcttcctctgaccgtacggacaatcaggttgctagtgggcgtggtgatggccatcattactatggcaatagctatgccggcggtgaaactgccgaagcctggaccgtaggtgtcaaatatgacgcctataacgtatacctggcggccatgtacgctgaaacccgcaacatgacctattatggcggcggcgatggcggtgatggcggtatcgctaacaaaacccagaactttgaagtggttgcacagtatcagttcgatttcggtctgcgtccgtccatcgcctacttgcagtctaagggcaaagatttaggcggccaggatatggatagccgtggtaactatcgttacaccgacaaagatctggttaaatatgttgacgttggtatgacttactacttcaacaaaaatatgtccacctacgttgattataaaatcaacctgctggacgaagatgatgacttctacgcaaacaacggtattgcaaccgatgatatcgtaggtgttggtctggtctaccagttctaagacgctttatgttattcaagcccgtgcttagcgcgggcttgttattatagggtaagaattaaataacggataacggcgcaaagacaggttgacctggtttcatcggatagatgaagacaacatcgcttttttcaggcgctgtctgcaagagaaataacacttttggggaaaggaaaatgccactatagatgatggatgtcagcgtctatagatgataatcatccgggcataaaaaagctcctgtacggagctaatatgaattattttctaaaatctggcggaacctgccctgagcgaatgtataatccaacattatcaaaagtgatcatggttgacttacaaaaaatacatttcgcgccaaacgggttttgctcagtaacatcgaatgtcgatgttctgtattgtgaaccatggcaacatggacaccggaagtgaattttattagtaatatcagttgccttaaagcgccacaacgttgaccgctgatggaccttttggtccctgctctactgaaaactccacttcctgattttcattcagagtgcggaattcattactttgaatggctgaaaaatgcacaaacacatctttgctgccatctttaggcgtaatgaaaccaaagcccttttcagggttaaaccattttactaaaccagtgattttcgtcgtcataatattgttacctttcgaatgagcccttgggcaaaatggcctgaagaaaattatcagagagaaaaaaacctaaaggagatctcaagaggaacaaatgatgagaaatattacaatcactacttcagataagtttgtatcaaaccgcacaaccattaacgcatggttaactgaacatagcaagctttagttttgttaaaaaaatattaattgttttttagcattatcacgctgattgccatactctttttattcatgcctgtcgctacggctgaaacctggcgtaaataagtgacgtctcacaacgcctgccgggcaataaacgcgccacattttctgatgtcgtaaaccaggatacatgcgcctcatcgtgagaggttcctgtgatcttgtgcgaccaaaaccggttagagaacggggatgatttggcaaccatctcaggcattgatcgcacaagttacttaacacgcagtagatcagagtatcttgtggtgtaccgaggcgaaagcatttctcgcttcatagcccactgttgcgacatcccctgcccggcgaagtacagcgtccccttcccgtcttttgcgttaagatggtccagtacttccatcaacttcgcactaccggcgcgcggcgcgttatcgtcgaaaaggttgagttgcgctacgccctgactgaagaagtcacccagcatcacccccgctttctggtagcgatggccgtcgcgccatattttatccaggcatttcacagccgcattgataatgtcacgtgaatcctgcgtgggggtgagaagcgtcaccgcggcgctgttaccgtagtagggctcgttcagggcaaagggtgatgttttgacgaatgttgaaatgaaacggcagtactggtgctcgccgcggagtttttctgccgcgcgcgcagcgtagctgtaaacagcctggcgcatttcctcatagtctgtgacccgctcgccgaaagagcgactacaaacgatttcctgctttgccggcgcaaactcttcgagctccagacatggctctccgcgaagctctctcacggtacgctccagcacgacattgaagtgtttcctgatgatccaggtactttgttcagagagatcgagagcagtcttgatgcccagggcattgagcttcttactgatgcgcctgccgacaccccagacatcctccacgggtatcagggccagcagccgacgctggcgatcgatgttcgacaagtcaaccaccccgtcggtctggcgctgccactttttcgcagcatggttagccagcttggcaagggttttcgtctgggcaatgcctacaccgacagtcaggtgcgtgcgcttcaggaccgtcgctcttatctcgcgcccgaaatctgtcagatcccggcagtttcgtacccccgtcagatcacaaaaggcctcatcaatgctgtaaatttctacccgcggcaccatctcctcgagtgtggtcattacccggttcgacatatcagcgtaaagctcgtaattactgctgaagcaaacaacaccggatcgccggaagcgttctttctgtttgaagtatggctcacctggtgcgataccgagctgtttcgcctcggcgctacacgcgataacgcagccatcattgtttgataacaccaccaccggtcggccacataaatcaggacgaaagaccgtttcgcaggaggcgtaaaagctattaacatcgcagagcgcgaacataatcaactgaccgctttaatgataaaggtcaccaccccgaatatgtcgagcgtgtcttcactgccgacaggtataggtcgataggcgccgttcatggggattaactgcactgtcgggcgcaactgcaaccgttttacggtgaactctccttcaattgccgcaattacaatgtcaccgtggtcagcgttccgtgagctatccaccaccagcaggtcaccgtcgctgatgcctgcttcaatcattgaatcccccgaggctttgacaaaatatgttgagctgggatgagaaacgagcaactcattaagatcgatacgctgctcaatgtagtccgccgcggggctggggaatccacacggcactaagtaactgaaaaatgggagaggaataatttcgcgcaactctgtaggtctgaaaaattccataatccatacctcgaatactgtttttatatacagtagtgttatttgaacatgcgcgcaagataccggagtcgctacgactgtttaaatcttcgtcgcttcgtttgtaagtttctctctcagttcaaattatgggttttgtaaattttccggttgtattgtcatgtgcgcatatttaagccagcctggaggccagattttctgtacagcgtcgacagtcccgcagcgtaagttatcgccacgcgccagcgcgtttccctcacagcaattaatcttctgcccggcgcccatgtctacaggggaacatgtcgggcaacaggccgggtgcgacgatgaccgaggacgacggcgttaagtcgccgcgagtgacatcaatattaatccagatggggtacggcgaaagagcggggcagaaaaccaggagttgacttatgatcgaaaagtaaaaataacaccatccctggccccctcttctggcagaaaaagcataagatggcgatacgtttttcacgtaatattctaacagaatattctaagtgtattctaagtgtgagactgatcgctgaaagaagatgagctaagtgtttgaattgtggcggagagagggggatttgaacccccggtagagttgcccctactccggttttcgagaccggtccgttcagccgctccggcatctctccgtatattgcaatgatgccaggtaatttggcattttaacagaccctattcgggtaattttgttcaagtgacgagtttacgagcaaaacgatgattaagtggccctggaaagcacaagaaataacccagaacgaagactggccgtgggatgatgcgctggctatacctcttctggtaaacctcaccgcgcaagaacaggctcggcttattgcgctagccgaacgttttttgcagcagaaaagactggtagcgctacagggatttgagctcgactcgttaaaaagtgcacgtattgcgttaattttttgcttaccgatcctggagctcggtattgagtggcttgatggttttcatgaagtgctcatttatcccgcgccctttgtggtagatgatgaatgggaagatgacataggtctggtgcacagccagcgtgtcgtacagtcggggcaaagctggcaacaagggcccattattctgaactggctggatatccaggactcgttcgatgcttcgggtttcaatctcattattcatgaagtcgcgcacaaactggatatgcgtaatggcgatcgcgccagcggcatccctttcatcccgttgcgcgatgtggctggctgggaacacgatctccacgcggcaatgaataatattcaggatgaaatcgatcttgttggcgaaagcgctgccagtatagatgcctatgccgccaccgaccctgctgaatgttttgccgtgttgtcagagtattttttcagcgcgccagaactgtttgctccacgtttcccggcactatggcagcgtttttgccagttctatcgccaggatccttctcagcgcttacgggtaagcgctgccgaaggcgactacggcgaggaatccgaacattaattcctcactttgtgggttaattaaccaattgaattggcgcgttaattttactgttgacacgttatagccggcccagtattatgcgcctcgttgaaacaattcctctgtagttcagtcggtagaacggcggactgttaatccgtatgtcactggttcgagtccagtcagaggagccaaatttagggaagcagacgttcactgacgtctgctttctgcatttatatcaactgattaaccccttcttcaggttcactctcgtttactaaaaaccactcgaagctatacccttttgctggtaaagctggttcgatttgcgttttaccagcacgcggagggaacagtcatgtcactgactgatactaaagtaaaaaatgccagaccagcggaaaaggccgtcaagctcgctgacgggtttggcctctatcgattcaaaatactggcagtcaggctatcgctttaatggcaaacagaaggtgttttctattggggtttaccctgcggtttctcttgctgatgccagacaacgccgtgacgaggtcaaaaggctgctggatcaggggattgacccgaacgcaaaaaacaggctgatgaaaaaatccttcaggaaaagcgcgataaaacccgctcgtcccgtgtcgtcgccaaaagctgatgcaccataattctgcctatgatattgacggaaaacttttcgcctgcaccagaaatttatctgccatttccgctaccggcgtcagactgcctgtatcaaccattttcacaaaatatttcacgtctaaagttcattctactccctgcccttaatctctacggcgttatgtctcagaattatttgccaagtgcctgccagtttttcacgtttcatcagacgctggtacatagccattgcggtaaggtcacagcatttgacttgtgcaattacagacaaagttgcgccatgccggagcaaagtaggaattagatcaaaacttcaacgctttgttgtttttgtcagcaaacaaacgcgcaaccttatttccccctttgacaagccgatcgcacatcgttactatgcgccccgttcacacgattcctctgtagttcagtcggtagaacggcggactgttaatccgtatgtcactggttcgagtccagtcagaggagccagattttagtttcgggacatcctggcgagtccggagacgtttaaaaaacaagaaattatctttacccggttgatctgataaggtttgccgggtttttttgacatccatagtttttggggcttaatcgggcctcacggttcgttgagtaaatggagccccctcctatggcattaaccgataccgctggcggcacgcagaccgatccgggtacaggaaaaccgtcagaaaatccacccgccgctcccaataagcccactccaccgaaagaagaaacgccgcccggcgcgccggagaaatacgcgttcaccgcccctgaaggtcaggaactcgataccagcgcgctggcgcagttcgaaccagtggcgcgtgaactgaacctgacgcaggagcaggcgcagaagctggtggacgtctatccgaaagtgctggcgggagtgcaacaacagcaagcggagtcatggcagaagcaaacagaagactgggctgcggcagttaaagccgataaagacattggcggtgacaagctggcgtctaatcttggcgcagctcagcgggctatcgacacgttcggtaccaaagaactgaaagagtatctcgatggtacctgcgccagatctctggtcaatgctgcaccgtgacggaagcgattccacccggcacctgttaccacatcagcgccttttactttacgggctgcggcctgcaaagacgtccggctttgctgccgcgtgaccgtcaatctgcgccagaatccgcgatctttcgcgcccggcactcaaccggtgcgtcactttcgtcgcgcaaagcgacaaagtgacgcacaaccactacaccgcgccatgcccctgttttcggggttccggcgttcattcccgaatctgacacgcctttttggggccgctgtcagcaagaaagaagagaaaaagatcgataccgaggggggggctgatgccccggagaatttctgctcacgcaggcagcctgtaccgcgtacagtctgaaactccctatacctcaacaaactgccactccggcgtaaaggtatcgttctggcgcagccaaagagcatacgccggagactgttcgtgttctcaaaatcacaggagaagtgtatgggcaagttaggtggtgaaatgaaggcactggcaaagcactgtggcggtagccataaaacggtgaacgattgcattcatatcgtgcagcgtttcgatcaccacttacgggctttgaacgtccatatccagcgggttgcgcagattaaggtgcgccacattgaaagctatattcatgaaaggttggcgcaggggatcggcaaacgcacgctgcaaaatgaaatggcctcgctgcgcgctgttctgcaacaggccgggcgtaaacaggtggcagagcatgagtggctgactaataaatcgctgggtctggctggtgcatcgcgcagcgggacgcgacaggcgatcacgccggaacattatcatcatgtgctggagacggcccgcatgaaagctccgggactggcggcggcgctggaactggcgaggctgatgggcttacgttcacaggaagcggtgcagagcgtgcaatggatctggggcatggggacgggcgtgggcggtatgtggcgcaggtgtatgggcaaatttgacagctggctaagagcgagcagcggatggagcaggttaccaccgttcacagttagtgaaagactgggcggaggtggtaaatatcaggctgcattaccttcccccttacagtccaaacctgaatccgatagaacgaatgtggaaattaatgaacgaacatgcccggaataatcgctacttcagcagtacgcgagagttcagggacgcaatatctgtcttttttaaccagacgctgccggatatagcggactcactgacatcccgaattaaagatcactttcaggtgctcactcccgcatcttgaggtttattgggtatataatcgttaataatcatcagcgcgttattatcaaattaaaaacaacgcgctcgtaatacttaaattattcttactggtaactgaagaaaactctctcctgccagaatatgctcctcgcatcctttacattaactctttgtttctatagcatgaaataagtttcagggagttattattcatacaaggagaacatcttgaagaaaatattcataacaattatagtttcattatattgcgcgaatatatgtgcaaaacaatcccccagtacagaatccaaacccgttaatttcatcgcccaaattgaaaatatcgattttaataaaaccgccattagcagtgacctgaaacttttactcgccgaccgttattattttaaagataaaacaccctgtaatactaataccctttctgcgcgcgcagaatcaatgggactgacgacagaagaatatattaataaaatacgcagtttaagaccggctattctcgatgaccgttatttttacctgacggtcgatcagtgcgatgctggcggcacgcccatgctgactggaatcgagctatgtaccgaagcgctgtgcggtgccgaatacatgaaaagatcgtctgacttgtggctggatgatgaactgcaaccgacggttaaacgtcaggcaacaacagtagtccatatgcccctcccctatgacaaagagaaaaaattatggaaagtcaccggctggtatctggaatcctcagaagaaacaggggaggtgatgcagagtaaacagatagcctttgaaggctataccaacgaagaaaacttcgctaaccgacaacgtgtttctgtatttaaatctttctatgaaagcggcaatctcaaaagtatttatcattataatgcgcaaaataagcgtgacggaaaagctgaaacttactttgatgaaaaagacaaaatagcggaaacgctgacgtttaaagatggtcaacccgaaggggaatacatcgtataccatgaaaacggagccgttgaaagtaaacgttactttgcccaaggtaaaattaaagatggcgaatgcccacatttttatgataacggcgttttaaaacaaaaacacagctatttaaatcagaaactggaaggcccggcatttgaatatttccctgatgggaaaataaaggggaaatattcatacagtaaaggcaccattgtcggcaccagtacggaatattattctaccggtaaaattcgtggtgtttaccacagaaataaccaaggtgaaaacgacggaacgttcgaacaatacagtgaagagggcaaactcctttctaaagcgacctataaaaatggcaaacagctttctgctcagagctggtatgaaaatgggcatcccaaagaagaatcctcttttgatagtgaaggccgtaaacatggtgcggtcaaagaatggttcagcaacggaaagcctgcctcatccaaaatgtataaacatgatgtgttagacggggatttcgaaaagtggtacgaaaatggtcaccgcgaatcagtctatccctataaaaacggtatgctaaatggggacgctaagcactggaatgaacagggcaaactcacctataccaccgaatataaagacgataaaaagcagggagccgatcgccgctggagcgaacgtaccggtaaacttgttgaagaggttatgtttgctaatgatgaaagaaacggcctgaaaagagagtttaacgatcgtacgggtaaggtcttaagtgcgctgccctatgtcgatggcgacaaggaaggtacagaagaagcctatgatgaagacggcataaaatacatccgttgttaccacaacgatgaagagctttcagagctatatgcgccgactgacgtcaccaataaggcaaagcagggtgacagcactgcgcaatatcatttaggtaagtatgagtttgaatgcacaaactacgatgcggcgatgaaatggttaactcagtccgcagagcaaaatcatcccggcgcgcttctctttttggcctatgcgtacaacgacggtgatggcgtagcgcaagacagtaaaaaatatctctcctatttattcaaagcggcagagcttggcgaaagtgatgcgcagttagaagtgggatatttaaatcttatcggcgaaggaatgccgaaaaacctgccggaagcctataagtggattaaaaaatccgctgaccagggaaatgctcaggcgcactataaccttggactcatgtacaggaatggtgatggcgttgagaaagacctcaacaaagccaaacttcatcttacagcggcggtaaaaggcggcgtcaaacctgcactggcagccttaaaggaattaacgcctcaaactaagtaaatatgactttgctgtaaagaggctattcaaacggaactgaaaggatacacgttgctatgaaatttaaattcgccacattactcacagccgccacggttttttactcttatcagagcgttgcacaaagtcagcaatcgcctgatgtctggtcagttgtcgaacagaaactgcaaaatgccgtccctttaaatgaaaacaccacttttaaatcgcaggcagcctggtttgaattacacagggaactgtttatgtacggcccgatgagccgtgcggatgcattactgaaaaagctggacacacaatcgaatgatgcgaagttttcgctaaaccatgaggcctcgtggatcgctgaaaataatagcccggatgccgcgatggttttcctgtccaaaattggtctcgataaaccgtcgagcattaccgcctacgagagctacgttgatggctgggttaatcgcaaacagcctgaaaaagccttagcccttcttagcaaaaatgccgacgcgaggaatttttatttagccacggttttagaatcctgtcactcagagcctgataaaaccgccgctatttataatgaaaattacgctgataaaattgttgttccttatactcagctaaaaatgctgcttattattgcgaagcagtaccatgccaagggcgacaccgcaaaggcgttggtttacgcagatagcgcgctgaaaatgtttgatacggctattgctcaacaaccgagtgctgaagcctaccgttatcaagagtatctcgacctgatggagatctattacgccacgggtaataaagagaaggcgatggcgttgtctgcgagattgcgcaaagcaaccggcaataaaggaagctatttccagtattcattaccgggattgctctctttttataagaaaaacgagctgacacagaattatcaggagacgctttcaacctgtgtgacgcaggtcgataaaatattcaattttgccccttcgccgcgcattgaaatggagctgattgatttattaagcaagcttgatgatgttgcgctgatgaataagcgtatcgatttgctgatgagcgcgccggaatatacctgctacgacgacaggtattgctacgagtacaaaatcaaagcgctgaagaatctctttcagcataagcagaatgctgtggcggaaaagcatatcgcaaccctctccgccgaggcgcaaaccctgacgttcgccgaatgggaagatgcaacaaatgaaataggtgaagtactcaaagaaattggccatcctgaggcagcgcaaaaattagccgtcagcgccgaggcgatttacctcagccaagcaaaagcctggcctgatgaagatatgtcgcgttcctttcaaagacttgcagagctttacggctatggcaacgacacggtgaatgccaaacgggtgttacaccagcacgttccctctctcgaagaggaggcgatgatcgaccactacatgaatgcaaaacagtggagtcaggcaagggaattgatgattaacgcagatagggtcgataataaaaacctgatgctgttacgccagatttgttctgaaaacacgcccgagtgtcaggaacatattacctttacgctgaaaaaattaaccacgcaggcgtcgattacccgccaggacgacaccggtaatcagcagctttatcagattgggaatatttttcacagattgggtatcataccgggagcggaacagcaggcgctgattcaggcgttgtataacaaggccgcagagcctaaaaaagccacgccttaatcgatttacccgcccggccacctttctcacatgcgggaaggcggcgggcgggaaaaatcaatcgcggaagtttttgaactggaacggctggcccagattgccgccgcgcatcagcaccatcgctgcctgcagatcgtcgcgggatttaccggtcacacgcactaacgtaaattcgaatccaaacccacagagattaccgcaagatattaatgttgacccaacaccgcctgccggaagacccgcgctggaacgccctgcacgaggagttcagctttgacgacgacgacaacctgctgggcatgaacatgccgcccgaaggtggcgagcatcaggcgaaagtcaaaggcgaccgcctgctgctacagggcagaccaccactatgagtacgacgagttcggcaatcccatcgctgaccgctggggcaaggcgcagtgccggaagcaccgatttgaatggaacggcgagcaccggctggtgcgctttaccgacgtgcgccactatgatgatgaaggctttccgcgccactcgtggcgctatgagttcgataatggcgtgaccaccctatatccctgtccgacgcgaaaatcctcagtatcaagccttctgataatccctttaagctgatcgattctcacggtcggtatctgcttgttaatccgggcttgtgggtccaggcgctcaaggagcgtgaagtgcggcgcaatgttttcgccttccggcgcgtttcctgacgtagacgcgattatcggcgacaggtctccggcgatggtgatgaagccgcggcacaataaggccttaacgggatacagaaccgcctcccgctaaggcttcattcagccactttccatatcacataaatacgcctcttccgctcctgtccagcagcaggcgacagctcatttcgttagcgaaacggtggctcattaaacgtgcgtaatttacgtgagtgcaaacgatcaccttctgcgcgtagtaaatcaatagcacgaataccaatttgcaaatgttctgaaatagccccctcataaaaccggtttgcctgcccgggcagtttaatttcaccgtgtaaaggtttgtcagaaacacaaagcagcgtgccgtaaggcacgcggaagcgatagccctgggctgcaatcgtcgcgctctccatatcaatcgcgaccgcgcggctaaggttgaatcgcagcgccgatgcggaataacgaagctcccagttacgatcatccgtggtgacgaccgttcccgtgcgcagtcgctgtttcacctcttcaccgggcattccgctaaccgctttggtggcgtcgtacagcgcacgctgtacttccgcaatgcttggaataggaatatcaggcggcagaacggcatccagcacatgatcatcgcgtaagtaggcatgggccagcacataatcaccaatcgcctgactttctcgtaaccctccacagtgcccaatcataagccagacgtcaggccgcaacacggccaaatggtcgcaaatcgttttagcatttgaagggccgacaccgatatttaccagcgtaatcccctgcccatctgccgttaccaggtgccaggcgggcatctgatgcttcttccaggccagatcggaaatagcctcttccggcgcttccgtttctgccgtgatccaaattccgccggcacaggaaagcgcgatatagggactgtcaggatcaagaatttggctgcatccccagcgcacaaactcatcgacatagcgggtgtagttggtaaacaaaacgaagggctgaaaatgttcaaccggcgtaccggtatagtgccgtaaccgggccaacgagaagtcaacacgacgcgcgtcgaagtgcgatagcggatagaattcgccggggtggaacagaccgtctgccgtctcatcgccaatctgcgccagttctgtggtaggaaaatggcgcgttagcccggcgctcatagaacgatccagcgtcagagccgagccatcgatcacataaggatacgggatctcatggtgcgaggcctctaccgcaatatgcgcgccataatcatggtaaacgaggttaagctgttccagaagataagcgcgaaatagcgcaggccgcgtaacggtagtggtataacagccgggatgagtaaagcgtccaaaagcgcgtgttttaggcgggttcggtgtcgcgccatcccagcttacagacagcgaaggataaacaaacagtccgttaagcctggcgtggggatcgggcagcgtaccgttatcaacatagtcagcgatggcttcacggagcgcgttaaccgactgctcgtatagctcctccaggcgatccagcgcctgctcgggcgttaggtttgtgcctttattttccatattattctccttagcgttcacaggtgaggcacgtcattcgatagtatgacagcaaaggaggaaactaaaggggttagcgtaagggtggcgacagtaaacatgaaccctttaaaaagaaaagagaactatcttagcgccaccatcatcgctcaaaaagaagggtactggtacagccatttgttaagttcattacaattagtcatataaccatttcccggcttttgctgactcgatcagcatgctgatagtgaaatctgggacgggtacaggttccgttttcttgaacggatgccatgaaaaagggtgattaggaaaataggtttctattctgaagttacctcgctcgacattgagttcctcgaagaatttattcatgagatcttcggcttcaagttcatcaatgctcagatcagtatcaaggtcaatctctggtgttaattccacttgcttaatgttgaaaagatatgtgccagcataaggccgtacaagctcgtaaacttgctgttcaatattgtctaccataacttatcattgccccgagcaatggtattgtagtcgcgtatagtgcaatatgttatttgtgacacatctgcggcaaggataatttccccgatcaaaggaatggaacgtccaacaaacggcgcaatgttacgaaccataacacgtctggctgtccatggggtgtaaccgcctaaccatgtcggaagggatattccaaagggaaattttgactttttaaacactgcacgtgcagtcctggacgcgtatgatgtgcctttagtcgctccagcgggtttcgcccttgtccaaagattattacgacctgatgccaaagcaacaacagccccgaaatctgcaacaccaatcccaaactggcttgcggtattctcacaaaaaatcataacagaagttcggcagcagtcagattggattttcctgcatagaagtatgttccatttagttcttctactgtatccattagaaactctatagttactattttggtttacttattgtacatccttgtttcgaatgaaagaaatcaatcttttgggaaagaacggatcaagatcactggaaatatctgaaatcagatgaaagagacagtcgcgattcccaccaggggcatcacctggcaagcttgtgtgatcgctccgtttgaaccgaacacatctatatgtcagcatactgatacgggtttgatcttgcggatagcggtatcggttaatgccatacgtaggggctccattttctcagcgaaccgtgaagcctccgattaagcccccaaaaaccatggatgtcaaaaaacccggtaaaccctctcaggtcaaccgggtaaagataatttattgttttttaaacgtctccggactcaccaggatatcccgaaactaaaatctggctcctctgactggactcgaaccagtgacatacggattaacagtccgccgttctaccgactgaactacagaggaatcgtgtgaacggggcgaatattaacgaggtgcccctggcttgtcaaagcctgttttcacaaaaaaagttcgtttgctgctttattccacacttcggttaaaattcaccgtttcctgatgattttcacagcaaaaagcgcttactccctctttacgcgcgggtatctccacagccagcgcccgcttatcagacgccagtaaaacagtgcgccacgcacggcccagtcaagaaacatccccagccaaacccctacaacccccatacccagcacaataccaagcgtataccctgccacaacgcgacagccccacatccccagcatcgatacccacatcgcaaatcgcacatcgcgcgcgcctttaaaacccgacggcaacacccacgcggccgcccaaattggcataaaggcagcattaagccagagcagaactttcactacctcttttacgtcctgctcctgggtataaaatgaggcaaacagacccgcaaacggcgccgtcccccaggcaattgccgtaagtacgatagtcgacatccagaatacatggcgcagttgacgctctgcctgaccaatttgcccggtaccaagacgcttaccggtgataatagtcgacgccgaaccaagggcgttacccggcaggttgataagcgccgccacggaaaaggcaataaagttacccgcaataacgttagtgcccattccggcgacaaacatttgcgtcagtagcttgccaccgttgaacagcactgattcaatgctcgccggaataccgatacccatcacttcccagataatgccgaaattcagcggcttcagatagcttttcagcggaatgcgcagcgccggattaaaaccaatcatcagcacccaaataatcgctaccgcgccgatgtagcgcgaaatggttaatcccagccccgcgccggcaaaacccagcccttgccaggagaaagccccgtaaatcaggatgctgctgataataatattgagaatgttcatcccgccgttaatcatcaacgggattttcgtattccctgccccacgcagcgcgccgctaccgattagcgcaattgccgcagccggataactcagcaccgtcagttcaaggtacgttaacgccagcccctttacttctggcgtcgcctcgcctgcgacaatattaataatttcactgccgaaataatgaatgaccactgccagcacaacggcaaatagcgtcataatcaccagcgactggcgcgccgccgcccttgcgcgtcgcctgtcgcgcttgccgaggctaaaggcgaccaccaccgtagtaccaagatcgatagccgcaaaaaaagccataattaccatattaaaactgtcggcaagccccacgcccgccattgcttccttgcccagccaactgacgagaaaagtactgagcacgcccattagcaaaacacaggtattttccagaaaaatagggatagcaagtggggtgatttcacgccagaacaacactttgtagctcttgcgtttggcataccagggcgtacggacgacagcctggcgtaaggcagtggagacgttcaaaatggaccttaaagaagagagttgaaaccacatttcaataatgagcgagaaatcgtaaggctgcaaagctttttgcagaaaaaatgtctgcaaatgcaacaaagtgatgagataacccgcaatcgaatctgtaagaggttaaatggggtttgacaaaaatttttccgccgctaatatacgaccccacacgattcctctgtagttcagtcggtagaacggcggactgttaatccgtatgtcactggttcgagtccagtcagaggagccagattttagtttcgggacatcccagcgagtccagagacgtttaaaaaaacaagaacttatctttacccggttgacctgataaggtctaccgggtttcttgacatccatagtttttaggggcctaatcgggggcctcacggttcgctgagaaaatggagcccctgccatgacactcactactaatacagatactccagcccatgaaaaccagcaatgcgacaggatatttaaaggccaggcctgcccgcgctaatgttgaccggcattccggaacggcgctccagcacctcattaacccgcgaagtatcaacgtcatcccctttgataaacgtgcgcagcactggcgtaacgggcaatggaacttttttgtctgactcaaattcagcacggttgcgagaaagcggttcgtgtacctccagccaacgactgccatccggctctaccgaaaatttaacgggcctgtcgataatctgaacgcgggttcctacaggaacatggtcgaataaatatttaatatcgtcattgcgtaaacggatacagccctgactgacgcgaaggccaatgccaaagttagcgttagtgccatggatggcatataacctgccgatatatattgcgtatagccccatagggttatccggccccgcaggcaccatcgcgggcagcgtttttccctctttagcatattcccgacgcgtattagccgttggcacccaaaccgggccatcttgtttgcgttcaaccgcagttacccagttgcgcggcgtttcacggccagcctgaccaataccaataggtagcacctcaaccgtattcgtgcctgcgggataataataaaggcgcatctcggcgacgtttaccacaataccttcacgaacggtgtcaggcagaatcaactgctgcggcaccaccagtgtggaaccagactgaggtaaaaacacatccacgccgggattcgcttcaagcatattactcagcccttgaccgtagcgggcggcaaatgactctaagggctgagtattgttctgcggtacggcgattgtgacaggctgtcctaccagacgactgccttcgggcggcaacggatagcttatagccagcgagaaatggcttaccaacaagacgaaaaacggaaaaaaaggtgtgatacgacgcattatatcccttcctttgtcgcggcaggtgtgcgttaagtatagcttttttctcacatggctggtgttgtgcgcccgggttatgttgcgtttgcgttcccctccggcaggacaatattactggccgccaactcccccatgttgtggaacatggcgcacgcggcttccacgatcggcatcgccagcgccgcgccgcttccttcacctaaccgcatcgccatatgcaaatagggttccatagacaaatgcgcgagcgcgatgcgggcgcccttttccgccgaaaagtgcgacgggatcagataaggtctcaccgcaggcgcaatctgacaggccgccagcgctgccgagtaggaaagaaagccatccagcaatacgggtaagccacaccttgccgcgccaagcatcacgccggtcatcccgaccagatcaaaaccacccaccttcgacaacacatcaatgccgtcgcgcggattgggctgattaatcgcaatcgcccgccgcacgacgtccactttattatcgatgcgggaaggcggaagattcgcgccaatccccaccacctcttttgcatcacttcctgtaaaaacgctgaccatcgcggcggctggcgtagtgttcgccattcccagctcccctacgccaaataaggtcacgccgcgttgcgccaggtcgcaggtgtagcgggaaacctccagcaaaagcgcctcagcctgcaagcgactcatcgccgggccaacggcaatatttccgcagccgcgcgcgacgcgcatattaactacgccaggaataggttcggcatcaataccgacatcaatgacatgcaccttcgcaccggcctgagcggcaagcacgcatacgccggttgttccccgcgtcatattcgccgcctgaatcgccgtcacgattttgggcgaaaccgctacgccttcatcccagacgccatggtcggcgcacatcaccagcaccgccttttcacctacctgcggcgtaccgttaagacccggcatacccgcgagctgaacggctaaggtttccagtctgcccaggctgcccggcggtttgagcaggccgtcaatatgttgctgcgcacgcgccatcgcctcggcgtccggcgcaggaatgtcacggagtaaagcgtgtagtgtctgcataagatgtctcgtccgtaataatcggctcataacagagccagcagaaagatcaattcaccaagttcgatcgccgcgcccagcgtatcgccggtttgaccgccaagcgtacgtttaagcaactggccaaggatgaaaatcgccgcgcatgtgaccaccattgcggccaacccttgcataccaggcagtaataccgtggcgacgattaccgccaatcccagagtaatgcaggtttgccgtccgctgactttaccgataaatacattgccaagcccctcttcacgggcgtagcgatgacggtacatcaataaaacggcgctgccgcgtccggccgcacaggccgccgccaacgccgccaacattggcgttccacgtaacgccagttcgctgaccaccagaatttttgccagtagcacaaaaataagcgccagcccgccatgggttcccagacgactatcacgcataatctccagcattcgctcacggcggcgcgcggaaaaaatgccatcgcaggtatcggccagcccatccaggtgaaaaccaccggtcagcagcgccagcgccagaatacagaacaacgccgctagcggaataccacaccagggttgcaggaggatgaaaatcaggccgcttacgccccccagaatcaacccgataaagggaaacatcacgatcccacgcgaatactgctcgaaatccagtccctgcgaccagcgtgacggcacgggcaagcggctaataaaagcgagcatggcccaaaacagcttactcatttaattttgactccaatacctgagactaccagccagacctcatccgccgctgccgccagtcgttggttgacccgaccggcaatatcacgaaaatggcgcgccagacggttttccgggacgatccccattcccacctcatttgtcaccagtaccactttcgccgggcagcgctggcaggctgcaattaaaatctgaatttcatcgtcaatggcgcgctccatcgccgcgtaatcccactgttcgggatcgttctcgcctcccagcgcaaacagcagattcgtcaccatggtggtaatacattccagcaaaatcgcgtcgtcaggggcaagatccgcggtaatcaacgtatcaagatgccgccagcattctgcggtccgccagtgtgccggcctgccatctttatgatgctgaattctcgccgccatctcgtcatcaagaatctgcgaggtggcgatatacagtacctgcggcgcatcgccaattaaggcttcagcatgacggcttttaccactacgtgccccgcccgtcaccagaatcatcataccggctcctgatgttgttgcatgatggtataaattttatcaatatcaatatgttgccgcatcgcttccgccagcagatcaaattgccgcgctttatgatccgcataacaaaaagtcgtttcccacggcgcaagcccctttcgcgcccgtaacccattgaccaccgcacgggtaaaggcatcgctgtcaaacaggccgtgaaggtaagtgccaaacgccagtccgtcggcggtgaccgcgccatccgccacagagcatccatttttctgtaacgtcatggccgtacagcatccttcctgcagcaccgtttcccccatgtgaatttcataaccgcgtaccggtagccccgccgcggcagccagccagccgggcagctcgcctgacattgtcgcgttaacctgcgtcgtggttttatcctgtgcaaagcgagtgattgtattaagcagccccaggcccggctgcgtacccagccccgactccacctcatccacaatggtgtcgcccagcatctggtagccgccgcaaatccccatcaccggcacgccctgccgatgtgtctgcaataccgcatccgccatcccgctttcgcgcagccaggcgaggtcgctcagcgtattcttactgcccggcaggatcaccagatcaacgtcagtcaacgcttccgggcggcgaatatagcgtatgcgcacatccggctgcgccgccagagcgttaaaatccgtaaagttagaaatatgtggcagttgcacaatggcaatagtgatatcacggggggcgttaccgcgatatttatcgttttgcagcgcgacgccatcttcatcttccagatccacatccagccacggcatcactcccaggaccgggacgccggtaagcgattcgatttgttcgataccggaatagagtagcgccacgtcgccgcggaatttgttgataatgacgccctttactctgtcacgctcctgtttatgcagcagcgccagcgtgccataaatagcggcgaatacgccgccccggtcgatatccgccaccagaataaccggacactgggccatttccgccattcccatattgacgatatcgcgatcgcgcagattgatttccgccgggcttccggcgccttccagcacaataacgtcatattcctgcgccaggctgttatagaccgcaaggatttgctcacgcaaacgcggtttatagtcatggtaactaaccgcatccatattggtcgccactttccccatcagcacgacctgcgcctggcgatcgctggtcggtttgagcagcaccgggttcatacgcacatctggcgtgatccccgcggcttccgcctgaaaaatttgcgcccgccccatctctttaccatccggcgtaataccagaattaagcgccatattttgcgatttaaacggcgcggtacgcagaccatcctgataaaaaatgcggcataaacccgccgccagcacacttttgccgacgtcggatgccgtcccctgcaacataactgcctgcgtcatgacgcctccctgaatgcgcacttttgcattcgatgaaaaaactccgtttctgttttacacagcggcagtcccagttgagtatgaagtttgaccagccagggctgggttagccccgcgtgttccatcgcttccgtacacgcgaaaacctcgccaggcgcgccatgcgtcaggatctggccctggcgtaatacgtatacggcatcgctaatttcataaataagatcgatatcatggctggatataatgacatgattgccctgcgccacaatccgcctgatgatagcaatcatctgagtgcgccctgcgggatcgagaccagcagtgggttcatccagcaatagatagcgcgcctgtagcaccagcgctccggcgatagccacacgttttttttgcccatgactcaaacactgaatgggctgatggcgaaaatgttgggcgtcaaccagcgttagcgcctcgtcgacgcggcgcgtgatttccgcctccggcacccccaaattacgtaaactaaatgcaatatcgctatcgatatcagtataaaaaatctgctgttcagggtcctgaaaaaccgtcgcaacttgctggcgcagcgccagtagtccgcgcttgctgtaatccagcggttttccctgccacaacacggcccctttttgcggacgcaacaagccgctcaggttcataaaaagcgtagacttcccacagccgttcgcgcccaccaaaccggtaacaggcgaaagcgaaaaatccatatttaaccctttaagtaccggctcattctgataacgaaaccacaggtctgaagtggcaagcataatagtccttacaggtgaaaatcaccctgatacagtttgatatccagcgtggtggtcatttgctgataacgcattaacacccgcgtaaacaggagtccagccagcatcgccagagatcgatagccgttcggcaggctgcaataaccaaaacgcagcgtttgcgcacgacggattgccaccgcctcatccagaagaataaagagaaagcgccacgttaacaggatttgctcggtaagcaggcgtggaatatgcgcgcgcttaagcaagctaattaactgcggaaacggtaggttcatcaccagccacaacgtcgcggacagcgccgtcaggctacgccagaacgtttcattcgccgtaaccacgcccgcacgggtaatcccgatccagtacggcccaacagatatgccagccagcagcatttgcggctcgcggctgatgctgaagataatcgttatcacgccgaccaacaaaaatccaaaaggtatcgccatccatcgacaccagcgccagagggatatgcgcaatagccaacagctcaatccggcaatgatcagcagctcaatgccctgccctacaggcggcagaacaaacgccagtatcatcatcgccagccacagcaaaaacttgcgctgcggcgcaacgtgtgcccagcggctttgatagctgagtcgatcaagcccggtcatcacggcgttgtttacctttgcaataccccaggatataaaaaatcaccgccgcgccaagagagccctgaagggtaaacagcaggctttcaatttcaccgctggcaggttcatataacggctgaaaccagggtttatactgcggcgcaatagcctgaatctggctttccgcttcgccgtctgaaccgccatattcaccgccatggttaataaaaaacggcagaatcaccagcgccaccaccatcgctaacaacatcaacgtttttttcattttaatgtccttgtacggtaatcacttgccgtttggttaactggtcataaatcatgacggttaataaaccttcagcaatggcgacaggaatctgtgtgaggcagaaaatccccataaacttcacaacagaccctgtcgctccggcatggggatcgggaaacgcaacgccaagctggactgaagtcacaaaataggtcgccaaatccgccagcatcgcgcacagaaaaacggcgacatcacggcgcagtccggcacggcaggccattttccacaccagataaccgacaaccgggccaatcaccgccatcgacattccatttgcgccaagcgtcgtcaggccaccgtgcgccagcaatagcgcctgaaacaacagcacaaccgcgccgagaatcgccaccaccccgggcccgaacaagataaccgccagaccaacgccggtcggatgtgaacaactccccgttaccgacggaattttgagcgcggacaggacaaaaataaacgcgccgcacagcgccagcagtaccttctgatgattatcctcctgcacaatacgccgtaagcgcaccagtccataccacaagcagggtaaaaacagtagccaccaggccagcgcccacactggcggtaaaaagccctccatgatatgcatcgcaaacgcctgttgcgggacaaccatcagcaatagcgctgcagccagtccactgaaagacaactgtcgaagctgctgttcaagtttcattctgcatactcccactgtttattgaccagaatggtcgaaaaatagggcaacggtcgatcatcgttgacctcgtggagatggcgccagcactgctcgccgggcagtgtggcctcggacatcattaaggcgcattccagcaggccagcctgcgccagcaaagctttaatacgggcgaaccggccatacactttcatcaacaccaggctatcatgctgttgtagcgcctgggctatttccgcttccggcgcggtacaagaaataaccgccagcgattgccgttctatggcgagcggcattttcgcgcgggcggctatcgcggcgaaggacgtgacgccggggacaatctccagccactccgggcagccgattcgctggagtaaaaaaatccaggtactgaatagcatcgcatcgcccagggtaataaaaccgacctgtttacccgcttccacctctgcggtaagcgcggcggcaacctcgttccagaccgcttctttctcggcgccgtcagcgctcatagggaaatggcaacaacgtacttccgtctgctcgccgagatagtcgcgcacaatcgacagcgccagactatcgccccccttacgaccggcgggcgcatacagaatgtccagcgagccaagaatccgcgctgcgcggacggttatcaggtcgggcgcgcctggcccggtacttaatgcgtataatttaccgttcatgccgcctcctctaccgccatgttcagcgcctggtgcaaatgcgcgacaaacatcgcccggatagccgggttttctcccagcccgctcagccacggcgtcgccggaatgcccgccgcgttaaagcgcattttccatgagtcgccgtcgtctgaagccatatcattaatggcgtgatcgcccgccaccagcattaatggcatcaaatgtacgccggtgacgccttcgtcacgcaggctgtcgatcaggatgtcgacctccgggtagctttctacggcgccgacgcgcgccggaaagcgctgcgcggtcatcatatgatcgagacaggcataagctgcgaatgcgtgatggctggcgccgtggcccataaaaacgactttctccgtttgtctgagcgatggcatctgttgtcgcaacgcctgcattagctgcacataatcgttatggctgctcaacagcggcacgcccagcgtcaggcgagtgaataacggacgcaagagttgtacttcacggacaattttttcatattcgtcgccgttaataatgtgcaacgactgaatcgccacgtcctgatatccctgtgcggcaagcttttgcaaagcctgtaatggcgtatcgatgtcgataccgtcacgctggcgaagcttgcgaatgatcattccggaagtgaaggcgcgaaacaggtcgcgatcgggacaggacgccgccagatcacgttcgcacgccacaatgtttttttcacaggtgtcgtgatagctggtgccaaaactgaccaccagaagcgcttttttcatttttactccttagctgcggccagccagcgcgataaacgctgcgcaaaggcggcctggctttccagtaactcatcacccgtcacaagcggcgtcgggcgcgcaataacgatgcaaggaatgcccgcatccagacagggctgaactttttcctgatatcccccctccgcgccggacgctttggtaatgaccacgtcggcccggcactggtggtaaaacgcggcgttaaaatcagcgctgaacggcccacacagagcgaaaatttctccaacgccgaaccccagttcgctgcagcgttgaatcacctccgccacgggcagtacgcgcgccagcaacgttttttccgccagcccggcacgccagacggccagatctttactgccggtcgtcagtaacacgcgcggaccaaaacgcctcgctatctcgcaggcatcggcaatactgcgcgccgtatagagaagcggatgcgtcagattgctaagctgctccggacgctgataacgacttaacaacacgcctgccgtttcacaggcgcgaaggaggttatggctgaccatttctgcataaggatgcgatgcatctattacccagcgagtacggttttcttttagccaggcgaccatctgcccgtactccagacgaccacagcgcacctgccctttaatgtcgcccgccagcgcttttccggctggcgtcgccacggataaggtgtacgcgacgttcgccgcatccagttgtcggcataacgcgcgcgcatcgctggtgccgcccaccaccagcacatccccctcattcacagcgtgtaacctcgcggcgttatcatcagcccatcctgaacataggtcgttttattaccaacgatgaccagactggtcatatctaccggttcaaaatccatatcgccgagcgtagtcagccatttttcctctttcttacgtccggcggatttcaccacgccaaccggcgtttgcgcgcttttactggcggcaagcaggtcaaacgcgcgcgccagatgcccttcgcggccgcggctgcgcgggttgtaaaaacagataacaaagtctgcctctccggcggcaacaatacgtttttcaattaccggccacggggtcagcaggtcgctgaggctgatatgacagaagtcgtgcatcagcggcgcacccagcagcgaggcggctgcgatactggcggtcatccccggaataaggcgaacctctacatccagcttctgcttgctcaccagctccagcaccagtcccgccatgccgtaaataccggcgtcgccgctgctaatcagcgccacgttatgcccggcctgcgccagctcaatcgccgcctggcagcgttcaatctctctgcacatcccggttttgatcacctgcttatcgccggtaaaggctttcaccaggtgggtgtaggttttataaccgacgacgatttccgccgcctgaagcgcctcaatcgcctccatcgtcatcattgcctgcgaaccggggccaataccaattacgctcaacatcagtgtgcaactcctaaagtaatagtgacgccctgttctcgcagggtctcgcctaacaattgtccctggcttaataaccacgctgccgggccggatacgctgccaacgcccaccgtttttctgacgaagccagaaccgggaaaatggtgttcgaattcgcgtaacgcttcggcggtaaaggttttaaaaggcacgcggcagcaggaggcgagctgaataagccccggctccccttttttgagcgtgacgctgccaatcgcttttaacgccagcggatcgagtttctgcgcttcaagctggcgcgccagtaatgtcgctaacaggggaaatggcgtatcgcggcggcagccaattcccgccaccacgcgctggggcaccagtttccagtgcggtacgggaagctcagagaggtcattacgcaaagagacgcagataagcgcatccagttcaggcagccgctgcaaatcatcaacagggataaaaccgcgaatatcacactggccgatctcttccgttagttcggcatcccaccataaccccacacgttgatgactgaccaacatctggttaacggtttttaccgccgttcgaagatcggacatgcgggcgttaagctggaaagctaaggtgtccaacgcggacatctcattgacatccgttgccgtggtaatcaccggatcggcgcctaacattcctgccaggtagcgcgtcaaggcattggccccgcccgcatgaccggaaagcaggctaatgacatgctgacctcgttcatcaatgacgaccaccgccggatcgctgaacttgtcgttcactaacggcgccaggacacgaacggcaatgccggtcgcgccgataaaaataagcgcggtataagtggtaaaagcctgccgggcggtattagcgaatccgccatcgaagggaataaatccctcttcccgcagtttttcactggtaaagcaggttaacggcagcatcgcggcgagtctctttgccagcgccacgccgccgggcgtcaggcaaaacaacgcaatggattcaggctttacggtattcatggctaaagtccgctgcataaagtcttgagtagtgatactccttacccagaaaattcccgaccaggattagcgccgtcttacggatgccagcatcacgtactttgtcgctaatatccgctaacgtgccgcgaacggtctgactttccggccaggtagccttataaatgaccgcgacaggcgtagttgccggataaccgccggcaatgagacgttccgccacccggtgaatacgctgaacggagagataaatcgccatcgacgtctggtgactggcgaacgcctccagttgttcgcgcgccggtactggcgtacgcccttccagacgggtaataatgagactctgcgatacctccggtacggtatattccacacccagctccgccgcagcgccgagaaacgcgctgacgccaggcactacctgccagtcgataccacggcgagttaactcctcgccttgctcacgtacggagccgtacagcgagacatcgcccgtttgcaaacgcaccaccgtttttcccgccttcacgcccgccgccatcagctcgataatctgctcaagatgcagttcggcgctgtcgtagcgttctgcctgcgcggggcagtaatccagcagttcggtattgatcagcgaaccggcatagataactacctgcgcctgttgcagcaggcggtagcctttaagcgtgatcagctcgcgatcgcccggcccggcgccgacgaaccatacacagcgtggatcaaatgtctctgacatggttttcttccttctgacaggcgataacaaaaacaggattgttcggtttgaaatagtgccccgcccccagcggcgttaacgatgaaagctgaagctgtacacagtccattcgacatgcgccgatgtgcgcaagatgcgccagcgcgctatgaaggttttcctgcaagataaaggtcatcaccagacggccaccgggatgcagatggcccatcgcccagtcaatcagcgccgtcagatgtccgccgctgccgcccataaacaccgcatcggctttcccggttatggtcattggcgcttcgccggggagaatatcgatattgccgcaggcaaagcgctgacgattctcatcaagcagccgtagtgcggcaggattacgctcgatagccgtcacctgcaacgaaggaaattgcagcgccgcttcaattgagacgcttcccgttcccgccccgacgtcaatcaggtgactggcgcggtggagctcaagtttcgacagtgccagcgcccgtaccgcctctttggtcattggcacgttctcgccgcgcagaaaaagctcatctttcatcaaggatcaccactgcattcatttcatagtcggcgttgaccgcactgacgggtagccagtggatccgctcattttccatcgccagattttcaccaatcaccattaagcgatgccctttgccccgcgcgaccagttcccgcgcgatttctcgcggcccgcagcgggcatccgtgaccatcgccactttgcgatggttcgctaactgctcgaagctgacgcaacgaccgtggctactggtcaaccacatgtcattcatatcaattccagcctgtgcgcacagatactgtacggcgctgatgccagggataatgcgaacctgttcgataccaaaatgcgccaccaggcgtgtaccgatgccataaaacagcggatcgccggaggccagcaccacgatccctttatcccgacgggcggcaatccatgacaacaacgcgccaatatccgcgcccagcgtaaatcgttcgccgccaaacgccggaaactgcgccaaatgccgtttaccgcctgccagcgcatcggcgtggtctatcgcttccagcgccgcaggcgtcatcaaatgccgtccagcgggccccattcccacgaccgttagcattgcagctccttagcaatctcgtcgacgggacgattactgccgagaatatggttatcaaaagaaaacaggatggcgtcgcagacaggcggcgttttggtaaaacgcagcatctgcatgactcgcaaacaaatacgcctggcaagatggttatagatatgcccgaagccatatgcttcaatgtgctccattgccgcttcggtggtatcgcaatcgctgaccagggtgagtaactccagcggcgcgcccagtaaagctaaatgcgcgaccagcgtttccatgcgcgcatcggcaatatggctatgggtatgaaagatcccggcggcgattttgatcaattttccaggatgacccaccagcactatctggcaaaatcccagccgtaccgcctcttcaatcatgtagccgacaaaattgctcatggtgacgactgcctgtgtgtcgacgcccatttgttcgcgaacaaaccgttcgccgtggttgcccggcacgagtatcacccgcgttaatcctgacgcccgtttgatctccagttccagcgatagcgagcgtttccagctttcttccgacatcggcgtcacaatgccggtagtgccaataatggaaatgccgccaagaatgccaagccgcgagttatacgttttttgcgcccgcgcttcgccttccggggcaaaaatctccacatcggccccacgcgccgggcctatcgcttcgcgcaccgctgactcaatggtatggcgcggcgtacgattgatggcggcgctcccgagcggcagtccaatccctttacgcgttaccgtaccaataccttcgccgccagtgagcgtaatctcaccgctgtcgttgagcgtaacgcgggcaaaaatcagcattccgtgcgtggcatccacgtcatcgccgccatctttacgaattgcggctatcgcctgctggccttcaatgtgcggcgactccacgttcaggcatagcgtgacgcccgacggcgtgacgatggagacctgatgaatcagatgttgacgtaataccatcagcgcggcgacttttgccgccgccgtcgcgcaggaaccggtggtatatcctttacgtaacgctttaccgtggtgccagaccggcgcgtcaaaagaaagctcgctcatcaggcctcccggaggtgatagagcaacgcattgacgatagcggcagccacgttactgccgcctttacgccctaacgcggcaaccgcggggaaatggctatgggtgagtgcctctttggactccgccgcgccgacaaagcctaccggtacgcccaccacgccgctcaccgtcacgttatgttcaagcaaacggaacagggccgtcggcgcattaccgaaaacaaagagcttgtttttctcctcctcggcgatagcgatatcgacggcggccattgaacgggtaatcccctgcgtttgtgcggcgcgcaccacgcgcggatcgctgatataacagcgacactcgccgccaaacgtcgccagtaatcttttattaatgccggacagcgccatcgtggtatcggtataaataatgcacggatggcgtaacgcatcacaaagctgctccagcgcatcggcagagaaccacaaaatgtccagccagtcgaaatcggcggtggtatgaataacccgcttgataatggcctcatggagcggactggcgaaacggtaatcaggacgcgtttcgcgaataatgtcgctaataatggtgaaactgttggcctcaatggtttggggctgctggatataatgcatactgtcgtcctcaggccacgccagataacccgcaccgcgccgcaattaacagcgccagcgccagggttgaagcgacccacatcaatcgaatcgttcgggaaatatcgtccacggaaatatcgcgctgcgcgtcgcctatccagggcttgtccacacgctcgccaaagtagttatttgggccaccgagctggattcctaaggcgccggccacacacgcttccgaccaggcgcaatttgggctactgtggttataacggtcacgccagccaatacgcagcgcccgccaaccactcaggcgacacagtcctgccgcaatgcccagcaacagccagctcagtcgggcaggaagatagttcgctacgtcgtccatacgggcgctgaccataccaatcgcccggtatttttcatgtttgtagcccaccattgaatccagggtattgacggctttgtaggccatcgccagcggcgcgccgccgagaaagaggaaaaagagcggcgcgataatgccgtcaacggtgttttctgcaaccgtttccaccacggcgcgattgatctgcgctggctgaagttgcgacgtatcgcgcccgacgatccaggagagttttattcggctttccgcaaggtcgttcttccgtaacggtcgttcaacctcctgcgcggcgtgggccagagagcgtccggccagcgtggtaaagatcatccagacttcgacgctccagccaaaccaggggtgaatccgctgcgccagcgccagtacgccccatgccacgccccaggtcgccccgacaaccacaacccacattacgccgccgccaatccgcagcgctttatcgccgggacaatagcgacgcacaatacgctgcacaaacgtgattaaacgacctatccagcgtaccggatggggccagtgttgagggtcgccgatgataaaatccagcacccaggcgatacaccaggcaagaatcgtcataatacgcgcctcgccgccgccagccagtgctgcaacatttccggacgctgggcgaaatggacgtgcagatagctggcaaacgtgttgcctgtctgccagccgccagtccattcctgtaacacgcggccatcgcgaaccttacgacaggccataacggcgggtgtttcggggataaaatctgagtagtgaaattcatggccgcgcactatctcgccaggcgccgccaatagcgttggctgcatagcctgcgcctcacaataaccaaagcgggtgagtcgcttacccattttgctgtgaccggggataatattcgccatctgatgaatttccccgccgctatcctccagagtgctccccagatacatcagaccaccacactccgcgtaaatcgccacgccgcgctgatgcgccgcccgcaaatgttttaacatcaccgtatttgccgccagatccgcggcgtataattcaggatatccaccgcccagccagatcatctgacaatcaggcaatgcgcggtcatgcagtgggctaaaacgcacaatgttaacgccggcacgctccagcaaatcgatgttatcgggataataaaagttaaaggcctcatcatccgccagagcaagcgtcagccctgcccccgctgtgttatcggggcgttcaggccacattcccgccggaagcgcggataacacgctcagcgagagtagcgcatccacatccactgtttgttccagcgtggcggcaaaatcatgccatgattgctgattgacgagggattctctggcagtaatcaaccccaggtggcgttcaggtaatgcgacgccgtcgcaaggagggacataccccagtaccggcagtgagcaataatgttcaatggcatttttgaggagctgatagtgggcgtcgctagtgacgcgattcacaatcacgcccgcgaggttgagggtcgggtcgaagtgctgaaatcccataacggtagccgcaagcgacgttgaaacagccttgccgtccaccagtaggatgaccgggcaaccaagctgtttggccatcgcggctgtgctgcagtaattggggtcgacgccatagccgtcatacaaccccatgaccccttcaatgacagcgatatccgcctgccgcatttgttcgcaaaataaggcgttgagaacaggaggaggaagcatgaaactgtcaagattacgggacgccacgccacagatagcggtatgccagccggtatcaaggtaatctggcccaactttaaacggctgtacgcgcagcgcgcgtttttgcagcagcctcaacaaaccaagcgtcaccgtggttttgccgcaaccgcttcctgtgcctgcaagaataaatgcgtgatgccttgccgccattaccctgatcctgttcagggtggtaggggtatacaggtacgcgcatgttcagtctttcgactgtacgcgtcttcgcaacccacttcccaccgaagttgttggttatcaccgacaggcaggtcttctggcttagcgtcctcctcgcccgtccttcccaatcttgcgatcagtggtctttacggggtcgtcagcatcacagcagcgggggctgcgggggattttcacccccttccctaccacaaatgtggcaaacctgttggtttacgttatggctgtacggcacacccataacgacaattaataatgtgctacgttttacatttctgtgagcaatagcctgagcggttgctcatctgacgttaatctactcatccttaccggtatattgacgataaaacgtatcgacaaagcgtaataaaacttatctttcctgacactgtacttcatcacaaaaataaaaactggtgcagtttatgccctaaattttattattttgttgcgctatgacaatttattgttacaccagataaattttctttctgaaatgattaagatacaaaagactatcaaaaatcggcaatagcaaaatattgctattcataacgatggaggatgagaattctcatttatctgctggcgataagcctgcggcgtaacctgataggtctggcggaagactttgcaaaaatagctggtttgcgaaaagcctaaattacgcgcaatactggcaatactccagtcactatggcaaagcaattctctggcgctaaccattctctggcggtttacccacgcattaaatccgattccctgatatttcttgaatagcttactgaagtaataggggctgagatagacatgtgaggcgacatcctcaagacgaagatcgtcggacaaatgcgcatcaatatagcgaagcgcttttttcattttactgtcatgcggagtgggaccacgagtggttttatttgcctccgattgctgcggattgtctttgataaccacgaaattgagctgttttttcaggcaattctcaacaatcagtttaagaagatcggcggaagcgataacgcgtgaatagtccatctctggcacattccgaaattcattcaagagctcagggtcagcctgccagcgatcgtcaacattaagaatgtttaccagctccacgtcattacttaaacgaacctgcccgcataaaacaaagccaactaaatgccctgcgattaccagcggaatagaaaaatccgttagaccggcatgacaacgataaatacagggttgatcggacttcgatgcctccagtcccccgcagcgatcgctcatacgacaacgtgtactatgctggggatgctgccgcatcaactgacaaaacggcgtgaaattgaatagctcagatatttcatcaccatgaatattgacaaccacaaccgccagaccggtggcttgtgcaaaatcctgtgcgattttattaatgagttctgagttcagagcgctcgcagaaatcatgataaaacccctcagttaatttattgttataaacaaaacacattatttacattcactttttattaccattatcctggccctgataaaaagtacaatgacaatatcaaaagtctcccattgctgggagacgttttgatcagttcgtgaaagcagatcacgaaattatctcacctgtttttacgatacatcattgctgtgaatctggttcgcatttccttacagttcacagcggttacaaggtaaattcttaccaataaaatagcgatatatggctgctccggcacaggcgccgataacaggcgcgacaatcggcacgataaaataagggatctctcgcccaccgctcatcgccatgttcccccaccccgctaaccatgtgaacagtttgggaccgaaatcacgcgccgggttcattgcaaaaccggtaaggggtccagtagacgcgccgataacggcaaccagtatcccaataagcaaaggcgcaagcggccctttaggaatgccattgccatcatccgtcaatgccatgatcatgcccatcagaatcgacgtaatgaccacttccaccaacgcagcctgccatacatttagcgctgcggccggataggtactgaaaatgctggctaattgcaaactttcgacgctaccgcgcaccatatgatgcgcagtctcaaattcagtaaaaaggctactataaagcacatacgccagcagagcgccgccaaaagcgccggcaaactgggcaataatataaggcaatactttctgtttggggaagcaggcaaacagccacagcgcaatcgtcaccgcagggttaagatgtccgccggagattccggcagtaaggtaaacggccagtgaaattccaagcccccaaataatgcaaatctcccataatccgaggctggcgcctgcgactttgagcgcgctcaaacaaccgataccaaaaaacaaaaagagtccggtgcctaaaaattccgcaccacattgcgcctttagagaatcattcatgtgacaccttctgagcaaagttcgtgtcctggccagcgcaagtttcggctggcggtagagtacagctaacctcactataaaaagtgccgcctgtaaattgttggcaacctgcgaacctgtctcccggaaaaatcgtgttgcgatagcaaaattttgcttttccgatatttttagcagcccatcatacgggagattcgagctataaaatacgcctgtgaaaataataaaatattgcacaagccaacttatcaatttcgaataagcatcacattttgcgtctttcgccatatcaaataaaaatactctcgtcactaacaaaaatgtaaaaatgaaataataaaaacaaaataatcatatagacaataataaattaaatgtaatttatcaataagttataaaagcaaaagacaatttagtcatattgctttcccattattttctgatgctcaacagcaagtcagccattctttttcctcgcatcttcttatagtcccaactatcggaacactccatgcgaggtctttatgcaacaagaagcactaggaatggtagaaaccaaaggcttaaccgcagccatagaggccgctgatgcaatggttaagtcagccaatgtgatgttagtgggctatgaaaagattggctccgggctggtaaccgtcatcgtgcgcggcgatgttggcgcggtcaaagcggccaccgatgcaggtgccgcagccgcacgcaacgtgggtgaagtgaaagccgtacacgtcatcccacgccctcacaccgatgtagaaaaaatcttaccgaagggaattagccaatgagcagcaatgagctggtggaacagatcatggcgcaggtgattgcccgtgtggcaacgccggaacaacaggccatccctggtcaaccccaacctatacgagagacggctatggcagaaaaaagctgcagtttaacggaatttgtcgggaccgccattggcgataccctgggcctggttatcgccaacgtcgataccgccctgctggacgcgatgaaacttgagaagcgctatcgttccatcggcattctcggcgcccgcaccggcgcaggcccgcacattatggcggcggacgaagcggtgaaagccaccaacaccgaagtggtcagcattgagctgccgcgcgataccaaaggcggcgcgggccacggttcgctgattattttaggcggtaacgacgtttccgacgtcaagcgcggtatcgaagtcgcgctgaaagagctggaccgcaccttcggtgatgtttacggcaacgaagccggacatatcgagctgcagtacaccgctcgcgccagctatgcgctggaaaaagcgttcggcgcgccgattggccgcgcctgcggcattatcgtcggcgctccggcttccgtcggcgtactgatggccgataccgcgctgaagtcagccaacgttgaagtcgtggcgtacagctctccggcgcacggcaccagctttagtaacgaagctattctggtgatttccggcgactccggcgcggtccgtcaggcggtgacctccgcccgcgaaatcggcaaaaccgtccttgcgaccctcggttctgaaccgaaaaacgatcgtccgtcctacatctgatacccacgaggctgattcatgagatcgaaaagatttgaagcactggcgaaacgccctgtgaatcaggacggctttgttaaggagtggatcgaagaaggctttatcgcgatggaaagcccgaacgacccaaaaccgtcgataaaaatcgttaacggcgcggtaaccgagctggacggaaaaccggttagcgaattcgacctgatcgaccactttatcgcccgctacggcatcaacctgaaccgcgccgaagaagtgatggcgatggattcggtcaagctggctaacatgctgtgcgatccgaacgtcaagcgcagcgaaatcgttccgctaaccaccgcgatgaccccagcgaaaattgtcgaagtggtttcgcatatgaacgtggttgagatgatgatggcgatgcagaaaatgcgcgcccgccgtactccatctcaacaggcgcacgtcaccaacgttaaagacaacccggtgcaaattgccgccgatgccgccgaaggcgcatggcgcgggtttgacgaacaagagacgacggttgcggtagcgcgctatgcgccgttcaacgccatcgcgctgctggttggttctcaggtaggtcgtccgggggtactgactcaatgctcgctggaagaagccaccgagctgaagctcggcatgctgggccacacctgctacgccgaaaccatctccgtttacggcaccgagccggtcttcaccgacggtgacgataccccatggtcgaagggcttcttagcctcttcctacgcctctcgcggcctgaaaatgcgcttcacctccggctccggctccgaagtgcagatgggctacgccgaaggcaaatccatgctgtatctggaagcgcgctgcatctatatcaccaaagccgcgggcgttcaggggctgcaaaacggctccgtaagctgcatcggcgtaccgtctgccgtgccgtcaggcattcgtgccgtgctggcggaaaacctgatctgctcttcgctggatctggaatgcgcctccagtaacgaccagaccttcacccactccgatatgcgtcgtaccgctcgcctgctgatgcagttcctgccgggtaccgactttatctcctccggttattccgcggtgccgaactacgacaacatgttcgccggttccaacgaagatgcggaagactttgacgactacaacgttatccagcgtgacctgaaagtggacggcggtctgcgcccggttcgcgaagaggacgttatcgccatccgtaacaaagccgcccgcgcgctgcaggccgtgtttgccggaatgggactgccgccgattaccgatgaagaagttgaagccgcgacctatgcccacggttcgaaagatatgccggagcgcaacatcgtcgaagacatcaagttcgcccaggaaatcatcaataaaaaccgcaacggtctggaagttgtgaaagcgctggctcagggcgggtttaccgacgtggcccaggacatgctcaacatccagaaagccaagctaaccggcgactatttgcacacctccgccattatcgtcggcgacggacaagtgctctctgcggttaatgacgtcaatgactatgccggtccggcaacaggttatcgcctgcagggagaacgctgggaagagattaaaaacatccctggcgctcttgatcccaacgagattgattaaggggtgagaaatggaaattaatgaaaaattgctgcgccagataattgaagacgtactccgcgatatgaagggcagcgataaacccgtctcgtttaatgcgcctgcggcatccacagcaccacagaccgctgcgcctgcgggcgacggctttctgaccgaagtgggcgaagcgcgccagggcactcagcaggacgaagtcattatcgccgtcggcccggcatttggcctggcgcaaaccgtcaatatcgtcggcttaccgcataagagcattctgcgcgaagtcattgccggtattgaagaagaaggcatcaaggcgcgcgtgattcgctgctttaaatcttccgacgtggcgttcgtcgccgttgaaggtaaccgcctgagcggatccggcatctccatcggcatccagtcgaaaggtactacggttatccaccagcaggggctaccgccgctctccaacctggagctgttcccgcaggcaccgctgctgacgctggaaacctaccgtcagattggtaaaaacgccgcccgctatgcgaaacgagaatcaccgcagccggtccctacgctcaatgaccagatggcacgcccgaagtaccaggcaaagtcggccattttgcatattaaagagaccaagtacgtcgtgacgggcaaaaacccgcaggaactgcgcgtggcgctttgataaaggataactccatgaataccgacgcaattgaatcgatggtccgggacgtattgagccgcatgaacagcctgcagggcgatgcgccagcagcggctcctgcggcaggcggcacgtcccgcagcgcaaaggtcagcgactacccgctggcgaacaaacacccggaatgggtgaaaaccgccaccaataaaacgctggacgactttacgctggaaaacgtgctgagcaataaagtcaccgctcaggatatgcgtattaccccggaaaccctgcgcttacaggcctctatcgccaaagatgcgggtcgcgaccggctggcgatgaacttcgaacgcgccgccgaactgaccgcggtaccggacgatcgcattcttgaaatctacaacgcccttcgtccgtatcgttcaacgaaagaagagctgctcgctatcgccgacgatctcgaaaaccgttatcaggcaaagatttgcgcagctttcgttcgtgaagcggcagggctgtacgttgagcgtaaaaaactcaaaggcgacgattaaggatttcgtatgcgatatatagctggcattgacatcggtaactcatcaacggaagtcgcactggcgcggcaagatgagactggcgcactgacgattacacacagcgcgctggcggaaaccaccgggatcaaaggcacgttgcgtaacgtgttcggcattcaggaagcgctcgccctcgtcgcaaagcgcgcggggatcaatgtcagagatatttcgctcatccgcattaacgaagccacgccggtgattggcgatgtggcgatggaaaccattaccgaaaccatcatcaccgaatcgacaatgatcggccataacccaaaaacgccgggcggagcaggccttggtgtgggtatcacgattacgccggaggagctgttaacccgcccggcggactcgtcctatattctggtggtatcgtcagcctttgattttgctgatatcgccaatgttatcaacgcctcaatgcgcgccggataccagattaccggcgtcattttgcagcgcgacgatggcgtactggtcagcaaccggctggaaaaatcgctaccgattgtcgatgaagttctgtacatcgaccgcattccgctggggatgctggcggcgattgaagtcgccgtgccgggaaaggttatcgaaaccctctctaacccttacggcatcgccaccgtatttaatctcaacgccgatgagacaaaaaacatcgtcccgatggcgcgcgcgctgattggcaaccgttccgccgtggtggttaaaacgccatccggcgacgtcaaagcgcgcgcaatacccgccggtaacctggagctgcaggctcagggtcgtaccgtgcgcgtggatgttgccgccggtgccgaagccatcatgaaagcggtggacggttgcggcaagctcgacaacgtcaccggcgaggccgggaccaatatcggcggcatgctggagcacgtgcgccagaccatggccgaactgaccaacaagccgagcagtgagattttcattcaggatctactggccgttgacacctcggttccggtgagcgtcaccggcggtctggccggggagttctcgctggagcaggccgtcggcatcgcctcgatggtgaaatcagaccgtctgcagatggcgatgattgcccgtgaaattgagcagaagcttaatatcgacgtgcagatcggcggcgctgaggctgaagccgccattctgggcgcgctgaccacgccgggtaccacccgaccgctggcgatcctcgacctcggcgcgggctccaccgatgcctccatcatcaaccctaaaggcgaaatcatcgccacccatctcgccggggcaggcgacatggtcacgatgattattgcccgcgaactggggctggaagaccgctatctggcggaagagatcaaaaaatacccgctggctaaggtcgaaagcctgttccacttacgccacgaggacggcagcgtccagttcttcccgacgccgctgcctcccgccgtgttcgcccgcgtctgcgtggtgaaaccggacgaactggtgccgcttcccggcgacttagcgctggaaaaagtgcgcgccattcgccgcagcgctaaagaacgcgtctttgtcaccaacgccctgcgcgcgctgcgccaggtcagtccaaccggcaacattcgcgatattccgttcgtggtgctggtcggcggctcgtcgctggatttcgaagttccgcagctggtcaccgatgcgctggcgcactaccgcctggtcgccgggcgaggaaatattcgcggcagcgaaggcccaagaaacgcggtggccaccggcctgattctctcctggcataaggagtttgcgcatggacagtaatcacagcgccccggctatcgtcattaccgttatcaacgactgcgccagcctctggcacgaagtgctgctgggcattgaagaggaaggcatccctttcctgcttcagcatcacccggctggagatatcgttgacagcgcctggcaggcggcgcgcagctcgccgctgctggtcggcattgcctgcgatcgacactcgctggtcgtgcattacaagaatttacccgcatcggcgccgctttttacgctgatgcatcatcaggacagtcaggcccaacgcaacaccggtaataacgcggcacggctggtcaaagggatcccctttcgggatctccatgcttaatcacaggagaacggcagtatgaataacgcactgggactggttgaaacaaaagggctggtcggcgccattgaagccgccgatgcaatggttaaatccgccaacgtacagctggtgggctacgaaaaaattggttctggcctggtgaccgtcatggttcgcggcgatgtcggcgcggttaaagcagccgtagatgccggcagcgcagcggcaagcgtcgtgggtgaagtgaaatcctgccacgttatcccgcgtccgcacagcgatgttgaggccattttaccgaaatcagcctaatcgatggcgaataaggagcaccgcgtgaagcaatcactgggattacttgaagtttgtggtctggcactggctatcagctgcgccgatatcatggcgaaatccgcttctatcacgctgctcgccctcgaaaagaccaatggttcaggctggatggtgattaaaattaccggtgatgtggcctccgttcaggcggctatcaccaccggtgcgcatttcgccgaacagtggaatggcctggtggcccacaaggttatcgccaggcccggagaagggatcctgctcgcagagacaccctccccctccgtcattgaacctgagcctgaagcgtcagagatagctgatgtcgtttctgaagcgccagccgaagaggccccgcaggaatcagaactggtcagctgcaatctgtgtctggatccaaaatgtccgcgccagaagggcgaacctcgtacgctttgcattcattccggcaagcgaggtgaagcgtaatggataaagagcttctgcaatcaacggtccgtaaagttctcgacgagatgcgccagcggcctattccgctgggcgtctcaaaccgtcatatccacctgtccgcacaggattatgagcggctgtttcccggccatcccatcagcgagaaaaaagcgctgctgcagccgggacaatacgccgcggagcaaaccgtcactctggtgggaccgaaagggcagctcaaaaatgtgcgcctgctcggcccgctgcgctcggtaagccaggtggaaatttcgcgtaccgatgcgagaacgctggggattgccgcgccgctgagaatgtccggcaacctgaaggggacgccgggcatccgcctggtcagcccctttgccgaactggagctgccttccggggttatcgtcgcgcagcggcatatccatatgtcgccgcttgatgcgctgatcctgcgggtttcccacggcgatatggtctccgtggcgattgaaggcgacgatcgcgggctgattttcaacaacgtggcgattcgcgtttcaccggacatgcgcctcgaaatgcacattgataccgatgaagccaacgccgctggtgccgataacccgcatgcctttgcccggctggtaggcccgcgatgaacggcgaaaccctgcagcgcattgtcgaggagattgtctcccggctgcatcgccgtgcccagagcacggcgacgctgagcgttacgcaacttcgcgatgccgactgtccagcactgttctgtcagcacgcgtcgctgcgcatcctgctcatcgacctgccgctgctgggtcagcttgcggatgcagaaaccggcgatgccgccgcccggaaaattcacgacgcgctggcgtttggcatccgcgtacagctcagcctgcacagccagctgctgccggttatcccggtaaaaaaactggctcgtctgccgctggtattcaccgatgagcacggactgccgctggttctgcatgcgggttcggtgctgagctatcgcgatgtcgcgctgctaagccgggggcgtgtggttgtccaccgcaaatgcatcgtgaccgccatggcgcgtgacgcggccaatgcgcggaatattcaattaattaagcaggagtaaatcatgcatctggcacgagtcacgggcgcggttgtctccacgcaaaaatcaccttctttgattgggaaaaagctgctgctggtgcgtcgggtcagcgccgatggcgaactccccgcctcgcccacctccggcgatgaagtggccgtggactccgtcggcgcgggcgtcggcgaactggttttgctcagcggcggctccagcgccaggcacgttttttccgggccaaatgaggccattgacctcgccgttgtcggcattgtagatacgctttcgtgttaaggggcggttatggcgatttatacccgaacaggtgacgctggcaccacatcactgtttaccggccagcgggtgagcaaaacccacccgcgggttgaagcctacggcacgctggatgagctgaacgccgcgctgagcctgtgcgcctgcgccgctgcggatgaaaaccaccgcaccttactcgaggccatccagcagcaacttttttggtttagcgcagagctggccagcgacagcgagcagccatcgcccaaacagcgctacatcagcagcgaagagatttcggccctggaagccgctatcgatcgggcgatggcccgcgtcgaaccgctgcacagctttattttacccggacgctgcgaagccgcgagccgcttacattttgcccgcacgctggcgcgccgcgccgaacgccgtctggttgaactggcaactgaagtcaacgtacgtcaggtgctgatgcgctatatcaaccgcttatcggactgcctgtacgccctggcccgcgcggaagatagcgatgcgcaccaggccaacatcatccgtgaagttagcaagcgctatctggctgcctgccagccgccccacagcaaggagacgacgccagtggccctctcattccacgatctgcaccagctcacccgcgccgccgttgaacgcgcgcagcaactgcaggttccggtagtcgtcagcatcgttgacgcgcacggcacggaaactgtgacctggcggatgccggacgccctgctggtcagcagcgagctggcgccgaaaaaggcctggaccgcagtggcgatgaaaacggcgacccatgagctgagcgatgtcgttcagccgggcgccgcgctttacggtctggaaagtcatttacagggaaaagtggtcacctttggcggcggttacgccctgtggcgcgacggcatattaattgggggtcttggcatcagcggcggcagcgttgagcaggacatggacatagcacagaccgccatcgcggctattaacgtgggaactcatcaatgaatacttctgaactcgaaaccctgattcgcaccattcttagcgagcaattaaccacgccggcgcaaacgccggtccagcctcagggcaaagggattttccagtccgtgagcgaggccatcgacgccgcgcaccaggcgttcttacgttatcagcagtgcccgctaaaaacccgcagcgccattatcagcgcgatgcgtcaggagctgacgccgctgctggcgcccctggcggaagagagcgccaatgaaacggggatgggcaacaaagaagataaatttctcaaaaacaaggctgcgctggacaacacgccgggcgtagaagatctcaccaccaccgcgctgaccggcgacggcggcatggtgctgtttgaatactcaccgtttggcgttatcggttcggtcgccccaagcaccaacccgacggaaaccatcatcaacaacagtatcagcatgctggcggcgggcaacagtatctactttagcccgcatccgggagcgaaaaaggtctctctgaagctgattagcctgattgaagagattgccttccgctgctgcggcatccgcaatctggtggtgaccgtggcggaacccaccttcgaagcgacccagcagatgatggcccacccgcgaatcgcagtactggccattaccggcggcccgggcattgtggcaatgggcatgaagagcggtaagaaggtgattggcgctggcgcgggtaacccgccctgcatcgttgatgaaacggcggacctggtgaaagcggcggaagatatcatcaacggcgcgtcattcgattacaacctgccctgcattgccgagaagagcctgatcgtagtggagagtgtcgccgaacgtctggtgcagcaaatgcaaaccttcggcgcgctgctgttaagccctgccgataccgacaaactccgcgccgtctgcctgcctgaaggccaggcgaataaaaaactggtcggcaagagcccatcggccatgctggaagccgccgggatcgctgtccctgcaaaagcgccgcgtctgctgattgcgctggttaacgctgacgatccgtgggtcaccagcgaacagttgatgccgatgctgccagtggtaaaagtcagcgatttcgatagcgcgctggcgctggccctgaaggttgaagaggggctgcatcataccgccattatgcactcgcagaacgtgtcacgcctgaacctcgcggcccgcacgctgcaaacctcgatattcgtcaaaaacggcccctcttatgccgggatcggcgtcggcggcgaaggctttaccaccttcactatcgccacaccaaccggtgaagggaccacgtcagcgcgtacttttgcccgttcccggcgctgcgtactgaccaacggcttttctattcgctaactgaggtcgcgatgaataccttctcactacaaacgcggttgtacagcggtcagggcagcctggcggtgctcaagcgctttaccaataagcacatctggataatctgcgatggctttctggcgcactctccgctgctggataccctgcgtaacgcgctgcccgcagataaccgcatcagcgtctttagcgagataacgccggaccccaccatccacacagtggttcagggcattgcgcaaatgcaggctctgcaaccgcaggtggtgatcggttttggcggcggctcggcaatggacgcggcgaaagcgattgtctggtttagccagcagagcgggatcaacatcgaaacctgcgtggcgatcccgaccaccagcggcaccggctcggaagtgaccagcgcctgcgtaattagcgacccggataaaggcatcaagtatccgctgttcaacaatgcgctgtatccggatatggcgatcctcgacccggagctggtggtcagcgtaccgccgcagattaccgccaacaccggcatggacgtgctgacccacgccctggaggcctgggtgtcaccgcgcgccagcgactttaccgacgcgctagcggaaaaagccgccaaactggtgttccagtatctgcccacggcggtggaaaaaggcgactgcgtggcgacgcgcgggaaaatgcacaatgcctcaacgctcgccgggatggccttcagccaggcggggctggggcttaaccacgcgatagcccaccagcttggcgggcagtttcatctgccgcatggcctggccaacgccctgctgttaaccacggttatccgttttaacgccggcgttccgcgcgccgccaaacgctacgcgcggctggccaaagcctgcggtttttgcccggcagaagccaatgatatcgcggcgatcaatgcgctgattcagcaaatcgaactgcttaagcaacgctgtgtccttccctcactggccgttgcgcttaaagaaggaagatccgacttttccgcacgcattccggcgatggtgcaggctgcgctggctgacgttacgctgcgcactaacccgcgcccggccaatgccgaagccattcgggaactgctggaggaactgctatgagcaccgccatcaacagcgttgaaatgtcccttagcgccgatgaaattcgcgagcgcgttcgcgcagcgggcgttgtcggcgcgggcggcgcaggttttcccgctcacgtcaaactacaggcgcaggtagagatttttctggtgaacgccgccgaatgtgaaccgatgctcaaagttgaccagcaactgatgtggcagcaagctgcgcgccttgtgcgcggcgtacagtacgccatgacggcaaccggcgcgcgcgaaggggtgatagccctgaaagaaaaataccgccgggccatcgacgccctcaccccactgctgccagacggtatccgcctgcatatcctgccggatgtatatccggcaggcgatgaggtgctgactatctggatggcaaccggtcgtcgggtcgccccggctgcgctaccggccagcgtcggcgtggtcgtcaataacgtgcaaacggtgctaaatattgcccgagcggtcgagcagcggtttccggtcactcgtcgcacgttgaccgtgaacggcgcggtcgccagaccgttgaccgttactgttcccatcggcatgtcgctgcgggaagtactggcgctggcgggcggcgcaacggtcgacgaccctggttttattaacggcggcccgatgatgggtggcctgattacctctcttgataatccggtgacgaaaactaccggcggcctgctggtgctccccaaaagccatccgcttatccagcggagaatgcaggacgagcgcacggtgctttccgtcgcgcgcaccgtctgcgaacagtgccgactgtgtaccgatctctgtccgcgacacctgatcggccacgaactctctccgcacctgctggtgcgggcggtgaactttcatcaggctgccacgccgcagctgctgctgagcgcccttacctgttcggaatgcaacgtttgcgaaagcgtggcctgtccggtggggatctcgccgatgcgcatcaaccgcatgttaaaacgcgagctacgggcgcaaaaccagcgctacgaagggccgctgaatccggccgacgagatggcgaaatatcgcctcgtgccggtgaagcggctgatcgccaaactgggactaagcccctggtaccaggaagcgccgctggttgaagaagaaccgtcagtagaaaaagtcactttgcagctgcgccagcatattggtgccagcgcggtagcgaacgttgcggtgggagaacgcgtgacgcgcgggcaatgcgttgctgatgtcccgcctggcgcgctcggcgcacccattcacgccagcatcgacggcgttgtatcggccatcagcgaacaggccatcactgttgtaagaggttaaccatgtctcaggctataggaattttagaactcaccagcatcgccaaaggcatggagcttggtgatgccatgctgaaaagcgccaacgtcgatctactggtcagcaagaccatctgtccggggaagtttttactgatgctgggcggcgatatcggcgctatccagcaggccattgaaaccggtacgtcgcaggccggcgagatgctcgtcgacagcctggtgctggcgaatattcatcccagcgtacttccggccatcagcggcctgaacagcgtcgataagcgccaggcggtaggtatcgtcgaaacctggagcgtggcggcctgcattagcgccgcagaccgggcggtgaaaggctcaaacgtcaccctggtgcgggtgcatatggccttcggtatcggcggtaaatgctacatggtggtggcgggcgacgtttctgacgtcaataacgccgtgacggttgccagcgaaagcgcgggcgagaaagggttgttggtttaccgttcggtgatcccacgcccgcatgaagccatgtggcgacagatggtggaggggtaatggaaagacaaccgacaacggatcgcatgattcaggaatacgtgccggggaaacaggtcactctcgcgcacctgattgctaatccagggaaagatctctttaagaagctgggcctgcaggatgcagtgtccgccattggcatccttaccatcacgccgagcgaagcatcgattatcgcctgcgatatcgccaccaaatccggcgcggtggaaattggttttctcgatcgctttaccggtgccgtggtgctgaccggcgacgtttctgccgtcgagtatgccctcaagcaggtaacgcgcacgctgggcgaaatgatgcagttcaccacttgctcgatcacccggacgtaaagtcatgaagcgtttgatgtttatcggccccagccagtgcggaaaaacctcgctgacccaaagcctgcgcggcgaagcgctccattataagaaaactcaggccattgaatggtcgccgatggccatcgatacgccgggcgaatatctggagaaccgctgcctgtacagcgccctgctgaccagcgcctgcgaggccgacgtcatcgccctggtgctgaatgccgacgcccagtggtcgcccttttctccgggttttaccgccccgatgaaccgcccgacgattggcctggtcaccaaggccgatctcgccgagccgcagcgtatttcgctggttgcggagtggcttacgcaggctggcgcacagcagatttttattaccagcgcgctgaataactcgggtctcgacgccgtgctggattttctgaattcgaaggaacctttatgtcttacaaaataatggccattaacgccggtagctcatcgttaaaatttcagctgctggagatgccgcagggcgacatgctctgtcaggggctgattgagcgtatcggtatggcagatgcgcaggtgacaattaagacgcacagccaaaaatggcaggaaaccgtccccgttgccgatcatcgcgatgcggtaacgctgcttctggaaaagctgctgggttatcaaatcattaacagtctgcgggacattgatggggtgggccatcgtgtggcgcacggcggtgagttttttaaagactcgacgctggtcacggatgaaacgttagcgcaaatcgaacgtcttgctgaactggccccgcttcacaacccggtaaacgcgttgggtattcacgtttttcgtcaactgttgcctgatgccccttccgtagccgtgtttgatacggcatttcaccagacgctggatgaacccgcctatatttacccgcttccctggcattattacgctgaactggggattcgccgttatggctttcatggcaccagccataagtatgtcagcggcgttctggcggaaaagctgggcgtaccactcagcgcattacgggtgatttgttgtcatcttggaaacggtagcagcatctgcgccatcaagaacgggcgttcggtcaatacgtcgatgggctttacgccgcagtcaggcgtgatgatgggcacccgtagcggagatattgatccctctattctgccgtggatagcccagcgcgaaagcaaaacgccgcaacagttgaatcagttattaaataatgagtcaggcttgctgggcgtttctggcgtgtcgtctgattaccgcgatgtcgaacaggcagccaataccggtaaccggcaggctaaactcgctctcactctgtttgccgaacgcattcgcgccaccattggcagctatattatgcaaatgggaggactggatgcgctggtattcactgggggcattggcgagaactcagcgcgcgccagatcggcggtgtgccataatttgcaatttttgggcttagccgttgatgaagagaaaaatcagcgtaatgcgacatttatccagacggagaacgccctggtgaaagtcgccgtcatcaacaccaacgaagagttaatgatcgcacaagacgttatgcgcattgcgctaccggccacggaagggctttgtgtaccagcctgagagggttatacgacgcattgcggcaagtcatggtaataacgcttttaccatgacactatgcgcgcacactattcgtacctgaaaggtgataatgtggctgttgcgcaatgccccgcctcatgcggggaacttatccagggatggattctgggcagtgagaaactggtctcctgccccgttgactggtacagcaccgtagcagtcacggctgcgccgccgttgataaacgagcgcccattgtcgcgggcgatggtggagcgcgttctggcgcactggcagtatcctgcgcactggagtaacgagattcgcgtcgatgtgcgttcgtcaattcccgttgccaaaggcatggccagcagcaccgcagatattgccgctacggcggtggcaacggcgcatcatcttggccattcgctggatgaaaccacccttgcacagctttgcgtctcaatcgaacccactgatagcaccgtttttcatcagttaacgctgtttgatcataataatgcggccacgcaaatcgcctgcgagccaccgccgccaatcgatttgctggtactggaaagcccggtcacactgcgcacgcaagattaccaccgtctccctcgccagcagaaattaatagcaagttcagcaaccttgcagcaggcctggaatctggtgcaggaagcctgtataacgcaaaatccgctccggctgggtgaggcggctacgcttagcgctatcgccagccagacgctgttacctaagccgggctttaccgccctgctgtcgctggtcgaagagtgtgatttatacggattgaacgtggcgcatagcggtagcgtggtgggtctgatgctggaccggaaacgtcatgatattgcgcgtctgaaaggtaagctggcagagaaaaaacttacccgacactggccaaaacaacatttactcaagatggtcactggcggggtcaaactgcagtgagagcctgatatacgctcccactgccgtagcgcattattcggcttttacatcggcgtgtttcatttcgcccatcgctttcagctttttggaaatgtcgcgacgctctttggagatttcggcatttttaatgatgtagtcatcaacgcgatcttcatagtcgcttttcatactggcgatgataccctgaatcgcctcaacgctcatacctggcttgatgtagtcgctcaggttgtccagcagcagcacacgcttctggttgtcacggatcttcttctcaatgtcctgaatttcacgctgcagtttatttttgcgacggaacagacgaacaaactccagcacgtcctggaaagaaggcttggttgtttccatttttacacccctgataatgtgagattcggattcgttaagcaactgctagtggataaacattacgtttatccccgtcatacttcaagccgccagaggaaacaccgttacgtcgccgtctggggaaacctgaaggttcggggataaaatcgttgccagtagcactcattttatccttatattagtatcatactcttaatctttgctgaatcgaagcagcaacaaattcattcgccccatctgctttttatttgcgcaaagcccggcagatcaaatgtgaaagcagttccaactgtcgggcagtttccatacttagccaaacatagccgtggataggggtttcagccaccgcgtcgccctgctgctcgttcattagctgccgcaactcggcagcaatatcattcagtttaccggtgtttgccagtaccggctgcgggttgccttcaaacaacgcgtgggcgatcgttagcaaggtttgctgcgtcatctgctgggtttcacgcaatgtgtgcgcgttaagcatcacaaaatggctggcgcgcgtcgcccagtgggcattgatttgtaattcaagcatacaaaccaggttgcggttgatggtctgaatggcctcgaaaatagatttttgtatccgggtttctttactggcaggcgttatcagcccgcgcattttgacgacatcgttcagcaaccgttgcaaatgtttatccaaccgggggcgctccagcaaattcggcgacagcgctgcctgatacacccgattatacgccgtgacgcaatgcgccagttggatgcgccagtgcaaaaaggcgcgctggggccagatgccggtaaacaacattgccagtagcgaccccaaaatcacatccccgccacgccataatgccgtatccatatcaccagcgggagcgccgacaacaacggcaagcgttatgcctatcagtagcgcctgatacggttttttccctaaggccagccagccgcacaaaaacatcgctatcgcacaccacaccagcatcagcggtaaggaaaagagctccaggcgtagcgccaccagccctaacgccgcgcccagaatcgtaccgcctatgcgctcaaaagcacgaggcactacatttccccagaatgagatgggccccataatcaccactaacgtgattagcggccatgtgccctcgggaatagaaaacagacgaaccagcagaaaggtaagaatgaacgccagggcgatacgtatgccatgcacgatgcgataatgacggtacaaccgtatttcaaaagggcttaatgacttatcggcacgcacgcttgcgctccttacgggaatggcaaaaaatgcattgtacctgctttatagcaaaaatagcgcactggcggacggaacacattatccgtccgctcttttcagccaggaaaccagtcgatcacttccgctgtaccggaatatacatttcaatatcccagtatccatcttccatgccgttattcagataggtttcaaaacagggcgcagaggctatctgataagcgctatcctgctcgaggacatcaaaaaaccgttcccacggcttcgcaaagtcacggtcttccactcgcgcgacagcagtggcatattcgccgccttcaatggcggtcacgattacgccttcgctattgtccggcaggatgaaattctctgccacggacaccacggtatcgcagcggagtttttctgcaggtacgacatctggattgtcgtaatagacggcaatccattcaactggcacgatccgctgtcgatccacccacgtcatcagttgttcaaaaccctgcttcacggtgtgttcccatggaccgaccatgtggaaaccggctatcttgcgtttttgttcctgcctgatttcgtaatccatgctgcctccgtcacttcacaatgctgtatgaatgtacagtataattacagccttttacggtcacaaggacagcgtgatcattttgtgagcaacctcgcaatcccgcccttttgacacctcagatgacggtgaacggtgtgtgtgacaacggcttacgctttatgctgaaaatagtcgctcagacgagagaacataccgcctttacccaccgattccagagtgaccagcggccactgagcgatcagtttatcccgatcgtagagctctatttcacctacctgttgatgagcggcgattggcgcctccagctcttttctatccagcacatattttgctttgatatgcggaatttccgctttaggcagcgccatccagaagtcctgttccgtacccagcgcaatcttttctttgtctccataccagattcgctcgctgcccacttttttaccgctgtgcaaaatctgcaccgtcgcaaagttttgctggccccactgcaacagttttcgcgcctgttcctcacgacctttcgaacttttcgcccccatcacaacggcgataagtcgacgctgcccgtccaccgccgatgcgataagattaaatcccgcccccgatgtgtgtccggttttaagcccatcgatatgcatggtcttatcccataacaagccgttacggttctgctgcgtgatgccgttccaggtcaggcttttctcgctgtacatgtgataaaattcaggctcgccgtgaataatcgcccgggagagtacggccaggtcatacgcggagctatgttgtcccggcgcatccagaccgtggacggtttcaaaatgggtatcctgtaaattgagttttttcacatagctgttcatcatcgccacaaactgcggctgcccgcccgcgatataatccgccagcgccacacaggcatcgttaccggaatccacgattaagccacggcttaaatcacgcaccgacacgcgatccccttcttttaaaaacatcaacgaggagccgacaaacaccggattatccttcgcccaggcgtcgcgcccaactgtgacgatatcgtcagggctgatacgatgactatcgatggcgcgatcgacgacgtagcccgtcattagcttggtaaggctggcgggattacgttgctggtgttcattaccggcggtaagaacctgtcccgtagtgtaatccatcaacacccaggcgcctgcatcaatggctggcggttggggagcaaaacttacggcatcggccgcaagcgcaggagaaaggtgcatcgcgaataaagaagcggcaataaacaaacggcgtttcaacagcatgtcctcaggatggtctctatttgccgttctttttacggaagttcagttaaacaaacatggataaattgcaagaaaatgtgacacaaggcacattttcttgctgacattattttatggatacgctcagacggcggacttatccccgcgcggcgcggtacgatgacgatgatagccgtcaaccatgctacggaaaatttgtcccggcgtgtcgccaagagtacacagatagagatgcgcgcaaataaacagtaagccgatgatagcaagcgccatatgcagcaccagcatcacagggcccagacccgcaacctgcggatagagacacagcaaaccggtgatgattaacagcggtaccagcgcgtacataatcgccagatatgccagttgttgcagtggattgaacttattctgctctgttgccacgaacggatgcgcttcccctttcataatgccaaaaaggtaaaaacgcgtctggcgtatgcagcgcgttaccagtccggaaaaatttacccgatagtgacgcccgttacctgtggtgaggttgatcagcacaaacccgacccagaaagccagtaaggcaaaaccacaccaggtatgcacttgtaccattagcgctacagggccgagagaaaaatgaccaaataaaccgcttaacagtaataaaacaaacagtaacgcatttccccaatgccagcggcgaatcgccagcgagtagagatagtcacgatgttcttcaccgcccgccgtttttggcgccagcatccggcgcaataacgcatggataaccagcccaacaagcatgagcagcaccacgacgcctgcgtaaattaaccacagcggccaataatctggcgcataatgtagttccgctccccagatagtattcatgctttaccctcctgatggacttctttacgacggtacagactgaccgcgccgctacgcgcctcctgctggcgatagacctctttctgaccgacccagcgctggatctcgctctcatccagtctgccgaatttcagcgcgtccgttgggcaaacggatacgcacgccggagactggccagccgccaaccgcgtgtcggcgcagaagttacacttgtcggcgacaccggtttgcggattcaaatagcgcacatggaaaggacacgcggcaacacaataatcgcagccaatacagcgcgatttatccacctgcacgatcccgttttcatcacgatatgacgctccggtaggacaaacgctgacacatggcgcattttcacagtgctgacaggagacgcggacaaattgaaaatgggttagtgcgttggatgcctgttcaggggcgcgaatttgtacctgtacgcggctaaatccctccggtacgtcattaagcactttgcaggcaacggtacacgcctggcagccgatacaacgtttttcatcatgcagcatgacgtactgattcgttaaatgattcatggttccctcctccctcatgcccggctcagcgtcacgcctgcggtatgcactaccgtaccggataccggactcgtcacgtgcggcagtaaatttccgcagtggataccgtgtgtcgtcgccgccgttttggccccagctttagcgccaaatcccatatagacaaaaagcgtgtccgggcggataccgggcgtcaccagcgccttacctttctctttacccgtggcattttccagccagatctcatcgccggtcttaatgcctttttcttgcgccgtttgcggatgaacccagaccgcgttatcccacattagctcgctgagtaaaggtacgtactgcgtcgcgccattggtatgcacggccaccttgccctgaatgaagtaaagctcattctcttttttcagcgcaaagtcacgaacgcgcggaacgccgtagccagggagcaattcctccagggttgcggaataaagttcgattttgccggagggcgatttgaagcgaagctgttcgccataggtgttgtcactgtccgtcgcgatagcgccggggtaacgcgccgtaaactgacgaacggattctggttcgcgtaatagcagcggaacgccccattcgagataccctttctgtcgcagttccttcgctaaggcatggtcgccgttcaactgatagagttggcgcgtctgcatatcctgccacggatagtactgccctaatcccaactgctcgccaagttctttccagatttgccaactcggacgcgcctcgccaatcggctctacgacctgttggcgcagagcgtaagccgggtgcagtcccgacatatcggatacctcttcgtcccgttcgagataggtgcattccggcagcagatagtcggcatatgccgcgctctcgctcaaatagacatcgcagctgaccaccagatccagttgctcaacggtttttaccaggtccgaacgacaggtgacggtctggaaaggattatgccgcgacataatccacgcctttatcgggtaaggcttctgggttaacgccgagtcaataatgctttgcaccacgccgccgccagcggcgatatatttaaactgcggtgcgaccaaatcgatgcgttgcgccgtcggtttcggcatatttttaatgttgagtttcgccagcgttggcgcgaccttttctccggccagtttattgtaaacagacgcgttttttttctgatatagcccgccttcgcgctcaatattaccgagcagcacattaagcgtaaaaatcatacgccgcatatcgatctcttcctgcgagaacgtcgcgcgatgaccaggactgacaatagcgtgaggcgcgcaggcagccagttcgcgtgtcacccggacaataacgtcggctgggacatcggcctgcgcggcggcccattccggcgtcgtctcttttaccgcctgtgctaactgttcaaatccgctggtataacgctcaacaaaagacgcatcgtagagctgttcatcaatcatgacgtggcacatcgccagcagaaccgctaaatcccccccgggacgaatagcgtgccactcatccgccttgctggaaaatatcgacaaacgcggatcgaagctcaccattttggcccccttctcctgcgcggtcattaactcatgggtatcggcaacttcaatcccttcatacaaattgtggccaaacgaaaccagatagcgcgtgttagcgatatccatcgccagatcgccgcccatcatcacttttgccgcaatggctttcccggcagggcatgttgaggcgtgcgtaaaggtattaggcgaaccaaaggccgtagccagatggaaaagatggctggagagcgagcccgatttggaagagaaagccacgctctcggggccatgctgcgctttgatggcattcattttcgccgcgatttcctggtaagcctgttgccagctaatcacctgccattcaccgtcgccgcgtggcccggtgcgtttcataggttttacaatccgttgcgggtcattgaccaggctgacgccgctcccgcccctggcgcatatgcgcgtcccctgctgcggcgcagaaggattgccctggataaaaacggtcttgttattgactacctgcgcctgaatagggcaacgaaaggaacacatttcgcacaagcttggcgttagcgtggttttaccgttaatgccggcaatcgggttgcgcgccagcgccccgggcggaaaagcgcccagcgcgcaggcagagcagccgatgcctaccccctgcaaaaaagaacgacgactaatgctcatataacctcctgttattagatatagctgaagattatatttaatttgtattatgaaatgtcggcttcaatcacaatttgaaatagttgttaaaatgagcatgtcaacacgataaaaccttttattttataaatattttacatttcctgaacacgcacatggactgtcattgaataatcagcagaattaccaaacaacccgctgttaattataaaaatgatacaattccaataacacgtaataatatttaaaagaaaacgattatttcctgaaaagcgatttcacgcgctttacgcagttctttctcatacgcgccggaacgtccgccgacgatatcccgaatgccggcgaaaaacgctggttgagcatcgaagcgggtttacttttgcgtgcacacgggcttcgttacccgacccgctcccttatgccttgatttttccgcagatacgtcagcgtcccacaatacggtgacatgatgacaggatggacactttctgaaagaaacctgccagataacatggtgaattgtgatctccatcgccataccgacatatgaagcttacttttaaggcgttaaaaatccagaccgtttttccataatgatgttgataaggaattctaatgaagatatcatcaggcgcaattaatttttctactattcctaaccaggttaaaaaattaattacctctattcgtgaacatacgaaaaacgggctcacctcaaaaataaccagtgttaaaaacacgcatacatctttaaatgaaaaatttaaaacaggaaaggactcaccgattgagttcgcgttaccacaaaaaataaaagacttctttcagccgaaagataaaaacaccttaaacaaaacattgattactgttaaaaatattaaagatacaaataatgcaggcaagaaaaatatttcagcagaagatgtctcaaaaatgaatgcagcattcatgcgtaagcatattgcaaatcaaacatgtgattataattacagaatgacaggtgcggccccgctccccggtggagtctctgtatcagccaataacaggcccacggtttctgaaggtagaacaccaccagtatccccctccctctcacttcaggctacctcttccccgtcatcacctgccgactgggctaagaaactcacggatgcagttttacgacagaaagccggagaaacccttacggccgcagatcgcgatttttcaaacgcagatttccgtaatattacattcagcaaaatattgccccccagcttcatggagcgagacggcgatattattaaggggttcaacttttcaaattcaaaatttacttattctgatatatctcatttacattttgacgaatgccgattcacttattcgacactgagtgatgtagtctgcagtaatacgaaatttagtaattcagacatgaatgaagtgtttttacagtattcaattactacacaacaacagccctcgtttattgatacaacattaaaaaatacgcttatacgtcacaaagccaacctctctggcgttattttaaatgaaccggataattcatcacctccgtcagtgtcagggggcggaaattttattcgtctaggtgatatctggctgcaaatgccactcctttggactgagaacgctgtggatggatttttaaatcatgagcacaataatggtaaaagtattctgatgaccattgacagcctgcccgataaatacagtcaggaaaaagtccaggcaatggaagacctggttaagtcattgcggggtggccgcttaacagaggcatgtatccggccagttgaaagttcgctggtaagcgtactggcccaccccccctatacgcaaagtgcgcttatcagcgagtggctcgggcctgttcaggaacgtttttttgcccaccagtgccagacctataatgacgttcccctgccggctcctgacacatattatcagcagcgcatactgcctgtgttgctggattcgtttgacaggaacagcgccgccatgaccactcacagcggactctttaatcaggtgattttacactgtatgacaggcgtggactgcactgatggcacccgccagaaagctgcagcgctttatgaacagtatcttgctcacccggcggtgtctccccacatccataatgggctcttcggcaattatgatggcagcccggactggacaacccgcgctgcagataatttcctgctgctttcctcccaagattcagacacggcgatgatgctctccactgacacgctgttaacaatgctaaaccctactcctgacactgcatgggacaacttttacctgctgcgagccggagagaacgtttccaccgcgcaaatctctccggtagagttattccgtcatgactttccggtgtttctcgccgcatttaatcagcaggccacgcagcgacgctttggggagctgattgatatcatcctcagcactgaagagcacggggagctgaaccagcagtttcttgccgccacgaaccagaaacattccaccgtgaagttgattgatgatgcctcagtgtcgcgtctggccaccatttttgaccccttgcttcctgaaggcaaactcagcccggcacactaccagcacatcctcagtgcttatcacctgacggacgccaccccacagaagcaggcggaaaccctgttctgtctcagtaccgcattcgcacgctattcctccagcgccattttcggcactgagcatgactctccgccggccctgagaggctatgcggaggcgctgatgcagaaagcctgggagctgtctccggcgatattcccatccagcgaacagtttaccgagtggtccgaccgttttcacggcctccatggcgcctttacctgtaccagcgttgtggcggatagtatgcaacgtcatgccagaaaatatttcccgagtgttctgtcatccatcctgccactggcctgggcgtagtccagcctcaacccgcatggaattaagggacacagcgttgtgtccctctgtacatagacccgttttagtccatgcattttttgagatcccggccagattgcccctggcctaaattccatacagtactaaatcagaatcagtaatttcagatggaccggaatatggtttaccatagagggagcgtagtttagtgtcgctgatgatcattttagtattttgtactcaccatcgcatgtacgaacattagcaacaatatcaattggtgtacaaatacaatcaatcaacgacaaaataaaagaataaaatatttcatatacatataacatcaggcgtgtacatcaagtgacagttaaaaacgacagcatacagagcacattcctcttccacgattacgaaaccttcggtacgcatccagccctcgacagacctgcgcaattcgccgcgctccgtacggataacgacttcaacgttattggcgagccggaggtgttttattgcaaacccgccgatgattatctaccgcagcccggcgcggtgctgattaccggcatcacgccgcaggaagcgcgtgagaaaggagaaaacgaagccgctttcgccagacgcattcatgcgctgttcaccgttcctaaaacctgcgttgtgggctacaacaatgtgcgctttgatgatgaagtcacgcgcaatattttttatcgcaacttttacgatccctacgcctggagctggcagcatgataattcacgttgggatctattggatgtcatgcgcgcctgttatgcgctgcgcccggagggaattaactggccggaaaacgacgacggcctgcccagctttcgtctggaacatttaacccgggcgaacgggatcgaacacagcaacgcgcatgatgcgatggcggatgtctacgccactattgcgatggcgcaactggtgaaaacacgccagccgcggctgtttgattatctttatagccaccgcagtaaacataaactggcggcgctgattgacgttccgcaaatgaagccgctggtgcatgtctccggcatgtttggcgcgtggcgcggtaatacaagctgggtcgcgccgctggcgtggcatcctgaaaaccgtaacgcggtgatcatggtcgatttagcaggcgatatttctcctcttcttgagctggacagcgatacccttcgcgagcggctttatacggccaaagccgatcttggcgatcacgccgcagtgccggtaaagctggtgcatatcaataaatgtccggtactggcgcaggcgaataccttgcgcccggaggatgccgaccggctgggaattaaccgccagcactgcctggataacctgaaagtgctgcgtgaaaacccgcaggtccgcgacaaagtggtggcgattttcgccgaagccgaaccttttgccgcctcggataacgttgatgcccagctctatgatggttttttcagcgatgccgatcgcgcagccatgaaaatcgtactcgaaaccgagccgcgtaacctgcccgcgctggatattacctttgtcgataagcgcattgagaagctgctgtttaattaccgcgcacgcaattttcccggtacgctggatgacgcagagcagcagcgctggctggagcatcgccgtcaggtgctgacgccggagtttttacaacagtatgccaatgaattgcagatgctttctcagcagtatgcggaagataaaacgaagctggggttgctgaaatcactgtggcagtacgcaaccgagattgtgtaattgaccaatgcctgacgggcattgttaatccagagcggataaatagtgacgccgccatccggtaaacatgctggatgacaaacaaaaaaccggaggcactgcctccggttttactattgccgataatacgcgcgattacgcgacgtcttcgtactgtggaaccgggttgcggaagcttttagttacgcacgccagataaatcagcccgatacccgcccagatcaggcccagtaccattgagctctcttccaggttaacccacaacgcaccaaccgtgagcgcgccgcacatcggcaggaacagatactggaagtgatctttcaacgttttattacgcttctcacggatccagaactgcgaaatcaccgacaggttaacaaaggtaaacgcgaccagcgcaccaaagttaatcagcgctgtcgccatcaccaggtcaaaattaatcgccagcagcgcgatcgccccgaccaggatgatgttcatcgctggcgtacgccatttcggatgaacgtaaccgaagaagcttttcgggaatacgccgtcgcgccccattacgtacatcaggcgcgctacgcctgcatgcgcagccataccggaagccagcacggtgatagtagagaagatcagcgcgcccacctggaaggttttacccgccacgtacagcatgatttccggctgagacgcatccggatctttaaagcgagagatatccgggaagtacaattgcaggaaataggttgcaaagatgaagatcaggccgccaatcagcgcggtcaggaaaatcgcacgcgggatcacgcgctcagcatctttggtctcttccgacaggttactgatgccgtcaaagccggtaaaggagaagcacaggatcgtcgctcccgtaatcatcgggataacgtgcgcatcgccggaccagaacggacgggtgctcgccagcgtaccggcgccttcgccttcaaatacgccataaaccaccatgcccagaatgaccgcaatcagcaccacctgtagcactacaatcacggtgttgaagttagcgaccgatttgaggctgcgcaggttaaaggccgtcataaaggccaccagcgccacaacaaacacccatgacggaatggagggcaccagcgcttcaaaataaattttcgccaacagaatgttgatcatcggcgcgaacagataatcgagcagagaagaccaacccaccataaagccaacggtcgggctgatggatttctgggcataggtatacgccgaacccgcggaagggtagcgacgcaccagtttcccgtagctcaacgccgtaaacagaatcgcgattaacgcgaatgcatacgccgtcggtacgtgaccgtcagtgaggcctgaaacgataccaaatgtatcgaacagcgtcatcggctgcatataggcaagacccatcattacaaccggaactaacgtaagcgttttacgtaattccacgcgagaggtgtttggagtaacgttatgcgacatggtcattctcctttacggcgaatgccgtcgcgtaagcaaaaaattgccccattttctggattcctcagcgacaacaactgtcgatttttaagtaagtatctatccggtacgaagcccggcctcttggtattgaatgatgtgtttgaagcaaaaaaataaccgacgcgtattaaaacgtcggttagtgtcattttttgcaagcggcgtattctgccctaaattgaagtgaaatgacaagagaatgcgagcgcgttcaaaaaattatttttcataagcgattgatttttaaaccggcgattttgcatacaccccagcaatagcattatttgctaaaatttcatcccgccaccagccactggccagcccggcggtctgttcattccagccaacccacaccggttcatagacgatttgcgccacaactttcttctctataagcgcgccgctttccaaaaatcgctgcgccagataacgcggtaaatagccgcatcccaggccgctaatttgcagctccagcttggttttaaaatcaaacacggtaatcgcttcctgagcgtcgagcagttcagaccctattgatcgcgaggaatggacgctatcgccaaccacaatcgcacgaaaacgtttgatcgtctggcggctaagcggttcctcttcatgaaccagcggatgatgaggggcgacggcaaacaccagttcaaggtcgcccagtcttgcaaagccaaagccggtgtcaggcggcggcgcgcgcatggcgccaacaataatatccgcccttccctgcgtcagcgtctcccatgaaccgccgagaacgccattaacaaatttaaggcgcgttacgctgtggcgttgataaaaagcgtcgataagcggggccagaagagaaaagggaaaggtatcatccacaccgatgaccagttcgttctcccagccttcatgcagtttaatcgcctgcttttccagctcgcgaacggtgtgcagcacttcacggcctttttccagtagcatcttaccggttcgcgtaaatcgcgcgcgatgcccgctacggtcgagcagttggatattaagatcgttttccagcttatgaacggtataactgagggcggacggcgttttaaataattttgccgacgccgccgcgaagctgccttctttttctaacgcatcaagaataatcagaacgtccagcagtggtttcatactcgtccccttgcgctatatggcgaccacctgctggacagcgactcactccatcggcatcaccaacggatcgggatattgatattcaaatcccagctcattacaaatccggctaccgtcgataatcttccctttgccgttgtccggtgcgtcacgaaaatgcggcggcgccattcccagcaagcgcgtcatttgcggataaaacacgttgcgggctggatgcgccggcgcacatatattatagatgtgccctcctttcggcgcctgtagcaagagggtaattgcgccaaccacgtcttcaagatgcaccagattgaccccgtgttgaccatccggcgcggtttttccggcaaagaaacgtccgggatggcgcccaggcccgaccaaccccgccagccgcagaatatccactgacgtgcccggcagattatgcagccaatcttccagttccttcagggtacgcccgctggccgtgaccggattacgcggcgtattctctttcaccacgccttgcgcatcgccgtaaacagacgtcgaactggtaaaaataatacgcgggatacgataagccagcgcgctgtcgaccagctcctgcatcgcctgcagataaaaatcctctcccggaccgctacggcgcgcgggcagtgttatcaccagcgcatcgacatccagcagagcgtcaagatcgtccgcctcacagaccaactccggctccagacgcagcggatagctttcaattccactcatacgggccgcttccaccccgtcaagggtggttttgctgccggtaacctgccagcctctcgctgccagcgacattgccagcggcatgcctaaccaacctaaaccgacaattgcgacctttttcatccattttctcctgactttaacgccttatacataaggctacgccagcccgccgtgactgacaattcatactataaatgcgaaatgaaaaaagcgcttgctttaaggcgtaaaagtggtttaggttaaaaggtatcaaatgaataagcattcatcggaatttttatgacacgcgttcaatttaaacaccaccatcatcaccatcatcctgactagtctttcaggcgatgtgtgctggaagacattcagatcttccagtggtgcatgaacgcatgagaaagcccccggaagatcatcttccgggggctttttttttggcgcgcgatacagaccggttcagacaggataaagaggaacgcagaatgttagacaacacccgcttacgcatagctattcagaaatcaggccgtttaagcgatgattcacgagaattgctggcccgctgcggcataaaaattaatttacacactcagcgcctgattgcgatggcggaaaacatgccgattgatatcctgcgcgtgcgtgatgatgacattccgggtctggtaatggatggcgtggtcgatcccggtattatcggcgaaaacgtgctggaagaagagctactcaaccgccgcgcacagggcgaagatccacgctatttaaccctgcgccgtcttgacttcggcggctgccgtttatcgctggcaacaccggttgacgaagcctgggacggcccggccgcgctggacggtaaacgtatcgctacctcatatccgcacctcctcaaacgctacctcgaccagaaaggcgtctcttttaaatcgtgtctgttaaatggttctgtcgaagtcgcgccgcgcgcggggctggccgacgctatctgcgatttggtctctaccggcgcgacgcttgaagctaacggcctgcgtgaagtcgaagttatctaccgctctaaagcctgtctgattcagcgcgacggtgagatggcacagagcaagcaagagctgatcgataaattgctgacccgtattcagggcgtgattcaggcgcgcgaatcgaaatacatcatgatgcacgcgccaagtgaacgcctggaagaggttatcgccctgctgccaggcgccgaaaggccgacaattctgccgctggcaggcgagcaacagcgcgtggcgatgcacatggtcagcagcgaaacgttgttctgggaaaccatggagaaactgaaagcgcttggcgccagctcgattctggtactgccgatcgagaagatgatggagtgatctgacgcctgatggcgctgcgcttatcaggcctacgtaatgcgttgatattttgggttctgtaggccggataaggcggaaccctgtgatggagtaaagaccatgagcttcaataccctgattgactggaacagctgtagccctgaacagcagcgtgcgctgctgacgcgtccggcgatttccgcctctgacagtattacccggacggtcagcgatattctggataatgtaaaaacgcgcggtgacgatgccctgcgtgaatacagcgctaaatttgataaaacagaagtgacagcgctacgcgtcacccctgaagagatcgccgccgccggcgcgcgtctgagcgacgaattaaaacaggcgatgaccgctgccgtcaaaaatattgaaacgttccattccgcgcagacgctaccgcctgtagatgtggaaacccagccaggcgtgcgttgccagcaggttacgcgtcccgtctcgtctgtcggtctgtatattcccggcggctcggctccgctcttctcaacggtgctgatgctggcgacgccggcgcgcattgcgggatgccagaaggtggttctgtgctcgccgccgcccatcgctgatgaaatcctctatgcggcgcaactgtgtggcgtgcaggaaatctttaacgtcggcggcgcgcaggcgattgccgctctggccttcggcagcgagtccgtaccgaaagtggataaaatttttggccccggcaacgcctttgtaaccgaagccaaacgtcaggtcagccagcgtctcgacggcgcggctatcgatatgccagccgggccgtctgaagtactggtgatcgcagacagcggcgcaacaccggatttcgtcgcttctgacctgctctcccaggctgagcacggcccggattcccaggtgatcctgctgacgcctgatgctgacattgcccgcaaggtggcggaggcggtagaacgtcaactggcggaactgccgcgcgcggacaccgcccggcaggccctgagcgccagtcgtctgattgtgaccaaagatttagcgcagtgcgtcgccatctctaatcagtatgggccggaacacttaatcatccagacgcgcaatgcgcgcgatttggtggatgcgattaccagcgcaggctcggtatttctcggcgactggtcgccggaatccgccggtgattacgcttccggaaccaaccatgttttaccgacctatggctatactgctacctgttccagccttgggttagcggatttccagaaacggatgaccgttcaggaactgtcgaaagcgggcttttccgctctggcatcaaccattgaaacattggcggcggcagaacgtctgaccgcccataaaaatgccgtgaccctgcgcgtaaacgccctcaaggagcaagcatgagcactgaaaacactctcagcgtcgctgacttagcccgtgaaaatgtccgcaacctggtaccgtatcagtctgcccgccgtctgggcggtaacggcgatgtctggctgaacgcgaatgaattcccgacagcggtggagtttcagctcacccaacaaacgcttaaccgctacccggaatgccagccaaaggccgtgattgaaaactacgcgcaatatgctggcgtaaagccggagcaggtgctggtcagccgcggcgcggatgaagggatcgagctggtgatccgcgccttctgtgaaccggggaaagacgccattctctactgtccgcccacttacggtatgtacagcgtcagcgccgaaaccattggcgtagagcgccggacggttcccgcgcttgaaaactggcagctggatctacaggggatttccgacaaccttgacggcacaaaagtggtgttcgtttgtagccccaataatcctaccggacaacttatcaacccgcaggatctgcgcacgctgctggagttgacacgcggtaaagcgatagtcgtcgccgacgaagcttatattgagttttgcccgcaggccacgctgacaggctggctggttgaatatcctcatctggttatcctgcgcacattgtcgaaagcttttgcgctggcgggtctgcgctgcggctttacactggctaatgaagaggtgatcaacctgctgttaaaagtgatcgccccttatccgctttctacgccagtggcggatatcgccgcccaggcgctgtgcccgcagggaataaacgcaatgcgcgatcgcgtggcgcagacagtgcaggaacgtcagtatctggtgaatgccctgcaacagaccgcctgcgtagaacacgtctttgactctgaaaccaactatattctggcgcggtttaccgcctccagcagcgtgtttaaatccttatgggatcagggcattatcttacgcgatcagaataaacaaccttctttaagcggctgcctgcggattacggtcggcacccgccaggaaaaccagcgcgtcattgacgccttacgtgcggagccagtatgagtcagaagtatcttttcatcgaccgggacggaaccttaatttccgaaccgccgagcgattttcaggtagaccgctttgataaactggcctttgagccagaggtgattcccgtattgctgaagctgcaaaaagccggttttaagctggtgatgatcactaaccaggatggacttggcacgcaaagcttcccgcaggcggacttcgacggaccgcacaacctgatgatgcagattttcacctctcagggcgtatgctttgatgaggtgctgatctgccctcacctgcccgcagacgactgcgactgccgcaagcccaaagtgaagctggtggagcgttatcttgcggaacaagcgatggatagcgccaacagctatgtgattggcgatcgtgcgaccgatatccagctcgctgataacatgggcattactggtttacgctatcaccgtgaaacgctgaactggacgatgattggcgaacagctaacgaaacgcgatcgttatgcgcatgtggtccgcaacaccaaagaaacacagattgatgtcagcgtctggctggatcgcgaaggcaacagcaagattaataccggcgtcggcttctttgaccatatgctcgatcaaatcgccacccacggcggctttcgcatggagattaccgttaagggcgatctctatatcgacgatcaccacacggtagaagataccggactggcgctcggtgaggcattaaaactggcactcggcgacaagcgcggtatctgccgttttggctttgtactaccgatggatgaatgtctggcgcgctgcgcgctggatatttccggtcgtccgcatctggaatataaagctgaatttacctaccagcgtgtgggcgatttgagcacagagatgattgaacactttttccgctcactctcttacacgatgggcgtcactctgcatctcaagactaaaggtaagaacgatcaccaccgtgtcgaaagtttgtttaaagcctttggtcggacgctacgccaggctattcgcgtggagggcgatacattaccgtcctcgaaaggagtgctgtgatgaacgtcgtcatccttgacaccggctgcgccaatttaagctcggtaaaatccgccgtggcgcgccacggttacaccccggtggtcagccgcgaagcggaaatcgtattacgcgctgacaaactctttctgcccggcgtcggcacggcgcaggccgctatggatcaactgcgcgaacgtgaactgatcgacttaattaaagcgtgtactcagccggtactgggtatctgcttagggatgcaactgctgggtcgtcgcagcgaagagacgcgcggcgtggatctgctgaacattatcgaacaagacgtgccgaaaatgaccgactttggtctgccgctgccgcacatgggctggaatcgcgtgtatccgcaggcgggcaaccggctgtttcagggcattgaagatggcgcctatttttactttgttcacagctacgcgatgccggtcaacccgtggactatcgcccagtgcaattacggcgagccgtttaccgcggcggtacagaaagataatttcttcggcgtacagttccacccggaacgttcgggcgcggcgggcgcacagttgctgaaaaacttcctggagatgtaatgattattccggcattagatttaattgacggcaccgtggtgcgtctccaccagggtgactacgcccggcagcgggattacggtaacgatcccctgccccgtttgcaggattacgccgcccagggcgccggggtgctgcatctggtagatctgaccggcgctaaagatccggctaagcgacagataccgctgattaaaaccctggtcgcgggcgtgaacgtgcctgttcaggtcggcggcggcgtgcgtaccgaagaagacgttgcggcattactgaaagctggcgttgcccgtgtggtcatcggttcaacggcggtgaaatcccctgacgtggtgaaaggctggtttgaacgttttggcgcgcaggcgctggtactggcgctagacgttcgcatagacgaacacggcaccaagcaggtggcggttagcggctggcaggaaaattccggtgtctcgctggaacaactggtggagacctatctccccgtcggcctgaaacatgtactgtgtaccgatatttctcgcgacggcacgctggcgggctctaacgtttcgctgtacgaagaggtatgcgccagatatccgcagatcgcctttcaatcctccggcggtattggcgatatcgatgatattgccgccctgcgcggcaccggcgtgcgcggcgtgattgtcggacgcgcgctgttggaagggaaatttaccgttaaggaggccatccaatgctggcaaaacgtataattccgtgtctggatgttcgtgatggtcaggtggtgaaaggcgtacagtttcgcaaccatgagatcattggcgatatcgttccgctggccaaacgctatgccgacgaaggcgcggacgaactggtgttctatgacattaccgcctccagcgatggtcgcgtagtcgataaaagctgggtggcgcgcgttgccgaggtgatcgacattccgttttgtgtagcgggcggcatccggtcaattgacgacgccgccaaaattctttctttcggggcggataagatctctatcaactccccggcgctggctgacccaacgctgattacccgtctggctgaccgttttggcgtacagtgtattgtcgtcgggattgatacctggtttgacgacgccacggggaaataccatgttaaccagtataccggcgatgaaaaccgtacccgcgtgacgcagtgggagacgctggactgggtgcaagaggtacaacagcgcggcgcgggggaaatcgtcctgaatatgatgaaccaggacggcgtgcgtaacggttacgatctgacgcagttgaaaaaagtccgtgacgtttgccgcgtgccgctgatcgcctccggcggcgcgggcacgatggaacactttcttgaggcattccgtgatgccgatgtcgacggcgcgcttgccgcctccgtttttcacaagcaaatcatcaatattggcgaattaaaagcgtacctggcaggccagggcgtggagatcaggatatgttaacagagcaacaacgccgcgagctggactgggaaaaaaccgatggcctgatgccagccatcgtgcaacatgcggtatccggcgaagtattgatgctgggctatatgaacccacaagcgctggacaaaaccattgaatccggccatgtcacgttcttctcacgcacgaaacagcgtttatggaccaaaggcgaaacctcaggccatgtgctgaatgtcgtcagcattgcgccagattgcgacaacgatacactgctggtgctggcaaaccctgtcgggccgacctgccacaaaggtaccagcagctgctttggcgacgccagccatcagtggttattcctgtatcaactggagcagctactggcagagcgcaaaaccgccgatccgaccagctcttacacggcgaaactgtacgccagcggtaccaaacgtattgcgcaaaaagttggcgaagaaggtgtggaaaccgcgctggcggccaccgtcaatgatcgttttgaattaaccaatgaagcgtctgatttgatgtaccacctgctggtgctgttgcaggatcaggatctcaacctcaccaccgtgatcgacaatcttcgtaagcgtcatcaataagcgtaaaaaaaccgggcaatgcccggttttttaatgagaaattttacctgtcgtagccgaccaccatccggcaaagaagcttacaaggcttttggcttatagctacgtagcgcattgcgtcccagcacaatcccggcaccgatcatcccacccagcaatacagccagcacaagggtaatggctgttttcgggctatcgcgacggaccggcagcgtcggcttcatcacataacgatagacgtgcaccgtatcggcagtcactttcagatttttaatgtccagcagtgtctgcttcgtctggtaataggccggagaaaagaccagtggacgcgtcgcttcgttctgtatcatcgattttagcgcatcgctccccaacaggaacatcgtgtcctgggtaacatcctgggtttgctgaatctgcggctgcgtgattttggcctcatccgcatagcgcaacgcttcttcgatttgcttaatacgcagatctttttgctcctgcgccacaacttcctgcgtctcaagggactcctgcaacgttttggtttgcagcgtgatgttatctttcaggtcaacttccagttccttagcgacctcttcatccacctgttggatatattccgccagccgacgctgcgccccttcagcggtagtactcacataagaaaccgagagtggcagcgcctgcccttttaccgactgttcaatggtaagcttttcccgctctttctgattatccagcacttccgataatgcggaaaacgcagagctaaagcggcttataaaattcgcctgcacttcagagattttgggggcattcccaccatacaagacgttgagcgcgttggtataggtggcaacctgcgcggcatcaggttgggtaataatcgccgtggatgtccatttttctttggctatcatcaggtagcctacagccagcaaaatggcgataataacggctacaataatggtcatcttcccacgccataactgtagcaataactcaatcaaatcaatctgttccggatcgttcccacgcccggaagacgtattactatccactgtcatagataccctaactaaaaaaaggatgaagctggagacagtgtagccataaagcaaatatatgccataggattaatgataaaaatcagacattatttccatttggtcaataaatcatcgggactcatcagccccgattgccttattaatcactaccgaaaagatcgcgggtatacactttttcagcgacatccaaaagctctgccgccatcctgttggaaataatgacatccgcctgctgtttaaagcagtgcaaatcacgttcaagacgtgagttaaagaaagtatcttcttccattaccggctcatagatgatgacctctacgcctttcgctttaatgcgcttcataatcccctgaatcgatgaggcgcggaagttatcggagccactcttcataatcaggcgataaatgcccaccactttaggctttctggcgaggatagcgtcggcaataaaatctttacgcgtacggtttgcttcaacgatagcggagataatattattaggcaccgactgataattggccagcaactgtttggtatcttttggcaaacaatatccgccataaccaaaagagggattattataatgattgccaatacgcgggtcgaggcacaccccttcaataatttgtcgggtatttaatcctaacgtttcagcatagctgtctaattcattaaaataagcgactcgcatagcgagataagtattggcgaaaagtttaatggcttccgcctcagtggagtccgtaaacagcgttggaatctcctgtttaatagcgccttcctggagtaatgcggcaaattctctggcgcgctcagactgttccccaatcacgatacgggagggataaaggttatcgtaaagggctttaccttcacgtaaaaactccggagagaaaatgatattttctgtcgcaaacttctgacgcattgccgccgtgaagccaaccggcaccgtagacttaataatcatcactgctgcggggttgatgctgatcacatcctgcatgaccgattccacactggacgtattaaaatagttagttttgggatcgtaatccgtaggcgtagcaatgatgacgtaatctgcattctggtacgcatcaaacttatccagcgttgccctgaatctgatgttatcttcctttaaaaattgctgaatttctttatcaacaatcggagatatccgatcatttaacagttcaacacgggaaggaacaatgtctaacgccaccacatcatgatgttgtgcaataagcaaaccattagacaagccaacataacccgtcccggatatcgtgattttcattattcgctctcagaattaacttaattatgaatcatgatgtatttcgcatcctgataagatattaaagttttaacgcctgagtatataaagtgcaacgcagacgaaaacaattcagattatcttcattacgataaacacagattattaagttaatattaagcaaaagcgataaatcaataagaatagagataaaaaaaagcccggtattaaaccgggcttaaacatttttgcagaaattattccaaccattcggtatggaaaatgccttctttatcagtacgtttataggtgtgcgcaccaaagtagtcacgctgcgcctgaattaagttagctggcagtactgcggcgcgatagctgtcatagtaggccactgccgcagagaatgtcggcaccggaatgccgttctgcaccgcgtaagccacgacatcgcgcagcgcctgctggtactcatcagcaattttcttgaagtaaggcgctaacagcaagttagcgatatcggcgttttctgcgtaagcatcggtgatcttctgcaggaactgagcgcgaatgatacagcccgcccggaaaatcttagcaatctcgccgtagttgagatcccagtgatattcatcagacgcggcgcgtagctgcgagaagccctgcgcataggagacgatcttgccaagatacagcgcgcgacgcactttctcgataaattcagctttgtcgcctgccggctgcgctttcggcccggagagcactttagatgcggcaacacgttgcgctttcaacgaagagatgtaacgcgcaaagacggattcggtaatcagcgacagcggttcacccagatccagcgcgctctggctggtccatttaccggtccctttgttggcggcttcatcaagaatgacatccaccaggtagtttccgtcttcatcttttttagtgaagatgtctttagtgatgtcgatcagatagctgctcagctcgccgttattccactcagtaaaagtgttcgccaactcttcattgctgagattcaggccgcctttcagcagggagtaagcttcagcgataagctgcatatcgccatattcaataccattgtggaccatcttgacgtagtgaccagcaccatcggcgccgatataggtcacgcacggttcgccatcttctgccacagcagcaatcttcgtcaggatcggcgccaccagttcataggcatctttctgaccgccaggcatgatagatggccctttcagcgcgccctcttcaccaccggaaacaccggtaccgataaagttaaaaccttccgcagacagctcgcgattgcgacggattgtgtcctggaagaaggtgttaccgccatcaataatgatatcgcctttttccagatacggtttcagcgaatcgatagctgcatcagtacctgcgcccgctttcaccattaacaggatacgacgaggcgtttcgagggattcaacaaactctttcaccgtgtaataaggcaccagctttttgccgggattctcggcaatcacttcttcggtcttttcacgggagcggttgaaaacggagacggtataaccacggctttcgatgttgagcgcgaggttgcgccccatcactgccataccgacgacgccgatctgttgcttggacattacatactcctgtcaggtgtggaaaccctgccacaaacggtcatggcaggttaaaggtgaatagtatgttaactcaaaggtatgatattaaggtagcgattgatgcgttcagattttacgcaggctaatttatacaattattattcagtacttctcggtaagcttaatacgcaccatctcgccgcaaaacaactttcgctgttttaaacagaatggcaatatcattccaaagcgtccagtttttaacataccaggaatcaaaataaacacgagtgtcataatcaacatcattacgcccactcacttgccatagacctgtcatgcccggctttgccatcaaataataatcaacatcatcacaataacgctccagttcatccgaaacgataggtcgtggtccaaccaggctcatatcaccttttagtacattaaaaagttgtggcaactcatcaaggctagttttacgtataaatcgacctacagctgtgattcgaggatcatttttcagtttaaaatctttctcccattcagccctggcaataggatcgttagccaaaagttcttttagtacctcttgagaattcataaccatagaacgaaatttgtagcatggaaaaagttttccatgccgacctactcgctggtgaccataaatagccggaccaccatctcgagtaactttataccacagataaatcataagtggtgatgcaattataagaatcattattgaacaaacaatatcaaatgtccgtttgagaaaacgggacgaccttttagccaagttattttgtatccttaataacataacttcatggctaaagataaaagacatatcagtattatataatggcaatcctctaaacgaggggactacagtaacagaacgacaatgatgttttgaaagttcacgtagccaaaaatgtgttttctccaactcggtgtattcataagcaaggatataatggacatcacctgtacgatttaaatcccaaataatctcagtatcctttatcaccggcaacatatttatttcagcatctgacgcatccgtatcaaaaaaagcgataacatcaaaccccatcatctcctcactttgcagcgcagaatatgcaccacgagcattctgtccgctccccaggatgatagtttttttcttccagatacctagcttgttcaataaatgctttgtaagtgcgcgaaaaaaaggcaccaggattagggcaaaagtccaacaaaacacccagacatagcgtgaaaactgccattttgtaaacgctatcagagccaaatcaaatatagcaaaaataacgatcgtacgaaaaatttcttttaactcataccaaaatggcttgcggtatgtataatgtcgcaaacgaatccaaaaccaaccgacacatactactgacaaaataaaatgcgtaataactcttgtatctaattggtcttgaggaataaatcgctgtacttgatcaaaaataaaatagacacatcctaatgaaaaccataaggctaaattaaaaaaaatcaaatccgatatagccaaaaaaattttacatagctgtggattatacttattatcaatattatccatttaatcctcaccctctgaccgtgcataatgtaaataaaataggcatattaagtaaataacattcaatttttttacagcaagcatcgttttttaatattagcaagcgttgtatttacaagatcctgagccctatttaataaattagcttctgcatagcagcgtaactcaggtgcattaccagaagcgcgcaaatgcacaatacatccatcacgtaaagtaattcgcataccatctgtcatatctgtagaaattgcaccttcattctccaaaccaatatagcttaagaggttgctcagattttctctgcccatactaattaaggattgacttttatcagttgtaatcccctgtaatctgtcagaatgggtgtaacgagttgggagttcattgactaaagcgctaatgctggtattcctacttttgtaaagcagcattattgctggtaatacagcatcacgagttggtaaggcatgaagattctgctcgttaatacagatgtcgcttcctaataaaaaaccgccattggcttcaaaaccgacaatacgactataactccgcgataattcattaaaagcttcgataacataaggcgagccaatttttgtaagcttaacatgtttaaaaaagcggccagaagaaattatgctgttacaactaacaggaatagcgacggcttctgcatccaatgcaagtgaacataatagacctagtatatcgcctcttagccactcaccggcctcatcagcaataagagggcgatcaccatccccatctgtcgagaatatggcatctaaatcgaactctttagcccatgagcgagctttttcccgatcctctttgcttacagcctctgtatctataggtacaaaattatcgcttctacccaagctaacgacttcagcccccaatgcaataaataaaggcttataaagatcacgcccagcgcttgaatgttcgtaaataccaatacgcttatttttcaggaatggagtagaaaataaagatgtataacgagatatataattaacagcagccatttctgaaactatgagttctttaagctctaaatggctgcacgtatcttcaacactaaggatcgcagcctcatcatgtttcgtgatttcaccatcaggacgataaaacttgaggccgttccgctcgaatggaatatgacttcccgtaaccattatcgcaggcatattgtcagacatagactgaaaggccaaagctggggttggtaccactccataaaaaatacagttaacgcctttatccgccaatgcagcagcacacgcctgagccatcccataactacttggacgattatctattgccaatgctacggtatcaaaggaaaaatgttcctgcataacggcaacaaatgaaaccgtaaaagcagcacatacctgaggtgtaaaatcttttacaagaccgcgagccccactcgttccaaacacaatacctgatgaataaataacatcacggctattattaactacgttcattagtccactccttcgaaaatccagaacgttgttctaaacgaataatatcatcctcaccaagataggtacctgattgaatctcaattaacttcaggggggtcattccaggattttccagcgcgtgaatagtattcggaggaataaatgttgattcattttcagaaaccatataagtctgctctccctttgtaacacgagcagtcccggataatactatccaatgctcagcccggtggtgatgcatctgcgccacaaatttctcacccggcttaacagtgatacatcgaacgaggtaatttttgccgctatcaatcacattatattttccccaggggcggaaaacttcttgatgttgtttatattcgttcctatcattccgttttaaataatcgacaatttttttaacatcttgtactgtatctttattagccaccagtaaagcgtctgttgtttgaacaatgacaagattgcttacaccaatcgcacttataaacatatcttcggaataaatgtaattatcattacaagcatgtgcgaaaatatctccttttaaaacatttctctgatgatctttattcgatatatcccaaagtgaggaccaggaacccacatccgaccagccagcgctcattggtatcaccaccgcatgctgtgtgtgctccataactgcataatcgatagaatcactcgggcatgacataaactcttctttatcaatacgaataaaatcaagatcgggatttatatgtcctaccgccttttcacaagctttataaatttcaggtgataaatactttaattcgtttaaataagagcttgcacgaaataaaaacataccgctattccagtaatatttccctgatttgaaatagtcaccggcggtatcgatatccggtttctccacaaattcagccactgcataagcgtcatttcctatcaactcaccacgacgaatatatccataacccgtttcagcatgcgttggaacaataccaaaagttacaagcttaccatttgcagcgtattcttcagcatgtctgacagctttcgtaaaagctatttcatcctgaatcacatgatctgcagcaagaaccaacaaaagaggatcagcattatcagcattctggagcgcacaaaacgcggcaagagcgatcgctggtgcagtattacggcctaccggttcgagaataatattatttgctaacttgtcaatttcacggagttgttcagcgactaagaaacggtgtctgtcattgcaaatgacaacgggttcttctgtagaaagtgaagctaatcgctttatagtattttgcagcattgatagtttaccttcaacgcttagaaactgcttcggatgatattcgcgtgaaagcggccataaacggctacctgtgccgccagccataattacgggaagaaaagacatttattttatctcttttgacgaagaatattggatattattccaataactcttgtacatgctaaaatagcgacatgtagacaacggtaaagattgccaatgcttgcctaatttgtaacccaagaatttagcaaaggttgttaataaagctcttggaatccagaacggtgcatttttaagcaggaattgaatctctgattttacgaagcggaaaccctcaccaccggctccgccaaagtcacgctgaatccacggagaacaagcatgaaatacaccagtatcaaaatatcgttgaaactcttctcgcggggtataattatgggagtgtcttaccaccgcttcagcgcagtaggcgaccttataacccgcctgaatcatcttagccgccataaacatatcctcggcaagaattgtatgttcaggaaacccacttaactcttcaaaaacggaacggcgataggcagcaaaagaattggacataaatacagttttaatacccaatttttctatatctgccttacttttaacaatagattttgaactataattaaaatttctggcatgcactgcaaggggattagcatctttatgaggaagttgtctaccacaaaccgctgctatcaatggatctgaaaaataataaaccaaatttttaattgcatccgaatccgcgagaattgcatcttgcgttagaaaaattataacatcagcgtccagagtttttgcaactgctaaatttctggttcctccatgattaaaatctttagagtcaatattaaatattgatatatttttcaggtctgaggctaacggaaccgtttcatctttagaacctgagtctataacaatcaatttatccggatatatagtttgctgcttaatcgcatccagaacattaggccaaagcgaccctgcattatatgtgggaataattaatgttattttcatttattttgattccgccaaccaattgccaaccatctgcttcatattatcaaagtcataccgtgcgacatagttgttaaatcgggaaattgcatcaggcaactgctctatatttttaattgcactctgccagcttttttcatcatccggattcacatataatgcaccattggttaacacttcatgaaatactggtatatcggacactataactggagtatttgatgccatcgcttcaataggaggtataccaaaaccctcatcaatagatggataaacaagcgcgtaggctttagaatataaaatctttaattcattaaatgagacttcatgtaaaaaagtcactttatcttttagttccagatcaacgaccatttgttggagagacattgcatagtcagtacgaccacatacaataattaaattataagagtcagaccaaacttttttattttttatgaatgaatgaatatttttatgtggccaacttgcaccaacagctaaaaagtaattctctttttcttttttttgtataaaatcagatttattaacactattataaattactgatattttctcactatctacattataagttttagcaatgctatctttaacggtataagataccgttaaaacatgcttacatcgcttaacggacatttttaataaaaagcgaaaatacactttctgaataaaactatctggataataaaaaggtcttatatcatgtacggttatcgtttggtttctcagtaaggggatagtgtgatgtgtagtacacaccaattttttattaccaaacttaattaaaaccctcagcgcaagccagtaactatatacataccatactaatggtctaagtcgcgatgtttttgatgtgttgctaacaatattcggaacagtaactactgcataaccgagcttttcaaaataatcagcgtgtaccttgctacagattattgcgtcaacatcagctatttctcgcagtgccgttaaaaatttaatcgagtattgccacattcccgtaccacttttacctaaacgtgataggtttacgatcattgaatagctctccgtttttccatacgcatctttaaagcaataatcataaggataaataatattacgaagcttacactaggtgtaattcttaataatagagttaatgtaataccggcagtaaaacactacaaaaacaatcataaagaaatatattattatactaacattcccagaaaaaaacatctaagtagttaagctatccaaatttatttatatatatcaaatatgatttttcattaaaaagaaaagtcagtaacgtaaatctagctgaatccagaaaggttaaatctacatttaatctcaatataataacttactactacttaattatccgtttagtaaaattcttaagcacggtaatatttttcactgcatatgctagtttcccaaatcgaagtacagtgttgatcatatttttattacaacctagctttgcataaaattcagataaatctcttttttcatcactattgccataacatgccatagccaaagttgtatataaccatggtctctcttttagcaaaacattttcaaatgctcgttttaaagatatatttttactgtaaaaatcattagctaattttaaatatgcaataaaatcaattaaaattcgtctggcctttcctttcttctcgaaactatcattatctcctcggcatattacgagtggttttgatatataatgcaaaaggcaccctggcgtattaaatacgctcatcatgataaatacatgaggataggaagtgccaatataggacgcatcaaaatcaatggcatcccatcgttctttttttactattaaagaacttagatagctaaatacaccaccaatagataagcatctactgagatagatttccctatctaaattattattaaacacataaagttcatcatctgttctgagccaagaacgatgagggtttctaatctcaactaaatcacacccggtctcttttctgtcacataaatatatatctgcttgagaatcgagataagtttgtaatatcgctaacgagtctttcgcaagagcatcatcactgccaaatatccaacaataatccccattcgcaagggatactgaagcaagaaaattcctatctggcccaaggttaacgctattacgccgatatattattgggaaattataattgttcctccaaacatcaatcatttcctctgtaccatcagtagaggcattatctgatatacatatctcaatatctaaattaaatttttcctgattatttatactattcaacaactcttcaagatattcttttctattataagttggaatacaaaatgatataagcatatgattatcccttatttgccttaattaagtaagttagtggaagcccccaaaaaacagttaaagcaaaagatataatcaagccaagcagcactccactgattccaagcgtactagaaaaataccattgtgctattccaccaattattgcttgtagtggtactaatatccaaagtatttttaaataattcatactttgcaataacattgcataagtgtcacaccaaacgcgaatacagaaatatatgccaattaacataaaagataaaatagaaacttgataattaatatctttggctattactgaaaatatctgttctttaaataaataaataaatattgtacatccaacaacatatagtgagccaagcaaaatattgacacctatcattttgttaagttttttccattgctgtttgactctcaattcagcacatataggccataatgcttgcaaaatagcagtataaataaaaaagactaaaccaaaaattttcatcgttactgtatattgaacaatatcagcaggagttagcctttgagaaatgaccatataatctgtttgaagcaccactatcgataataaagtaaaaagaaaaaaccctgaagatctacgtaaaattgctatataatgagattttgttgttttaacatgataaagctttatgtatctatatacaatatagcacaatgaaatcatacccactggaagatacaggactattagtgataattttatgtcaactgagatccccctatagtatatatatagcaagccgagcatacctatcatataagataatgcgtttaatagattagctttccacccgaccaattcggcaaaaagtattttataagcaatagctccgattccaatagaactgaaaaccagacatgaggtaaaaaagagcattctggttttgtcctgtaatacctcatgaaaagaagaaagatatttagcggaaattaccccagaaaaaatataaaataaagcaataaaaaaaataatagctataaagcttagatgtaatgctgatttaatatatgcatcataacttttgtttttggctctgcattctgatatataattttgcagtcctgtacctatgccaaaatcaacagcgctacaccatactaataaaccagttaacaaactaaagattgcatatttctcttcacctagcatagaaataagatatgaaatacttgctaactgcaccccggcaattattattttggataaccatgatgaacctgcaacaattaaatgactcggaatttttaacaattgaactttcactatgcaattaaacgacttagtttttacaacataacgcgactaatttgttaacgatttatttattaaaagatcatgaaaatctcataaccgtttcagtagttcttcaattccttttttataatcgaaatttggtttccagcccattgcttttaaatttttattatttgctacagagaacattatttcattatctctttgctctatcgcaccaaattcaaatatactcgatgaacctggcatcatagtattttgcaaataaaccagaaaatctttcaaacttaccccagcaccagttccaacttgatactcagtatatgaaggtacttcttttctattttctaatatagttaaataagcatttaccacatcatctacaaaaataaagtctcttatctgttcgcctgttgtacatttcacgcaactctgttttttatttaagcagtcgataatgtatggaataaatttattttcaccatccccaggcccatatacatgctctaatcgcatgtttacaaatgaaatgtcatgcatattagcataataatgcccaatttcatcaaagtgtcttttagtaattatataaggccgcatatgttgataattaaaatctttcttggcaaaaaaactatctgtatttaaaaagatatccgcccgatattttattgccaaatcaagaagctttaatggttttataacatttgcatcttcaatatttatgagagatgatgttttatgcccatattctgttgccaaatgaatgataccaattaatgcagaatcaattgataactcctcgactaataattcgatattatcccaactgcaccatctaacattagctaatgcattactattattttttattacatctcgagtgattgcgacaactgaaatccccgatttttttagcgcttcgagtaaatgcttaccaataaagccggaagccccactgacaattacatattctttcaaaaaggtcatcgcaatcaccagatagaataaattgaattagaaattcaaaccaaagaactcttcaaacttgctaactacataatctaaatgctctgtagtcaagcctggataaataccaatccagaacgtttgattcattatacggtcggtatttgtcaactcacccactacacgatatttcacattagcaaaatacggttggcgaatcagatttccagcaaacagtaaacgtgtaccgatttttgcttcatcaaggaatttcaccagttcgacacggttaacaccgctagtttctttcagggtgatagggaagccaaaccaggatggatctgatttctctgttgcttctggtaattcgaggaattcagtgcaagattgcaagccctgtttcagataggaaaagttagctttacgctgctctacaaactcttctacgcgctccaactgagccagaccacatgctgcctgcatgtccgtgattttgagattatatccgaggtgggaataagtatatttgtgatcatagccttgaggaagtgatcccaattgctgaccaaaacgtttaccgcaggtgttatcgcatcctggcgcacaataacaatcccggccccagtcacggaacgactcaataattttcttcagttcacctgacttggtgaatacagcaccgccttcacccattgtgatatggtgagccggataaaaactaacggttccgatgtcaccaaaggtacctaccatctggccttcataagtcgtcccaagggcatcacagcagtcttcaatcaaccataagttatatttatcggcaatccgacgaacttcactcaggttaaatgcattaccgagtgtatgagcgatcattatcgcttttgatttctcagtaactgcagcttcaatgagagaggcatcgatattatatgtcgggatatcaacatccacgaataccggtattaaaccattctggatcgccgggttaactgtagtcgggaagccagcagcgacagtaataacctcatcaccaggtttgagagctcgctcgcctaattttggggaagtcagcgcagtcagtgccagcaagtttgccgaagagccagatgttgtcgttaaaacatgaggaaccccaataaattccccaagttttttttcaaaggcatcattgaaacgaccagtagttagccatccatcaagagacgcctcaaccatcaattgtaactctttggcaccaataaccttcccggaaggaggcacaacgcttgtacctgcaacaaaaggtttcgggctcaatgcctcattcgcatactgagcgacaagctgagagatttgctcacgcaggttatttgctgtcattactttgattccttaaacttattttcttaacgagtagttgcagacatatagtcgctgatttcacgctttgaacaaatcaacatatcttcgccgcgaatccatgctttatgccattttacgatgcgaccaagtgtttcagtcaatccccaacgcggatgccatcctaattgcatatttgctttagagcaatccagtttcaggtaatgtgcctcatgaggatgattctcaccatccagtaaccagcttgcatcatcaccccaaagcgtgaccatcttgtcaacaataaattcgaccgtcttcgcatcttcatcacgcgggccgaaattccatccttcagaaaacttagcaccttctgtatataagcgttgcgccaccacaatgtaaccagaaagaggctccagtacatgctgccagggacggatagaatatgggtttcgaataataacctgctggttattttcaaatgagcgcagaatatcgggaattaaacggtctttagcccaatcgcctccgcctatgacattaccagccctcacagacgccaaaccaacgccatgttgctcataatttgcaggattgaagaatgagttccggaatgcagacgcgactaattctgcacaacctttactattagagtatggatcgtaccctcccatgggttcgttctcacgatagccccacacccactcacgattgtcgtagcacttatcactggtgatatttacgactgcctttatgttacctacttgcttaactgtttcaagcaaatggacagtacccataacatttgttgagtatgtttcgattggctgttcataagataggcgcactaaaggctgggctgccatatggaaaacaatttctggcttaaattctgcaatagaattgcgcagcttttcaaaatcacgaatgtcgccaatatgagattccataagatcattaagacgcactatctcaaataaacttggaacagttggcgcatcaagtgcatagccttttacaattgcacccatttcagtcagccatagcgaaagccagcttcctttaaagccagtatggccggtaacgaatacacgtttaccttgccaaaaatttttatcaatcatctagttactcccaggttttccacggagctttacctttttcccacagcccttcgaggtaaactttatcacgtagggtatccatcggctgccagaaacctgggtgttcaaaagccattaactccccctgttgtgccaatgtcattaatggctcttgttcccaggttgttgcatcgttatcgatgagatcgataaccgatggattcaacacaaagaaaccaccattgatcattgccccatcgcctttcggtttttcctggaatgaccggacctgaccagctcggatatctaatgcgccaaagcgtcctggtggaaaagtagctgttaaagtcgctttcttaccgtgagccttatggaaatcgatagtcgctttgatatcaaggtcggcaacgccatcaccataagtaaacaggaaagcctcgtcatcttttacgtattcagcaacacgtttcagacgaccaccagtcattgaagaatcacccgtatcaaccaatgtgacattccatggttcaacacgtttatggtgaacttccatacggttttcagccatatggaatgttacatctgacatgtgaaggaagtagttcgcaaaatattctttaatcacatatcctttataaccacagcagataataaaatccttgataccatgcacagaatacattttcataatgtgccaaagaataggcttgccaccaatttctaccatcggttttggttttacaattgtttcttcacttagtctggtaccaagtccaccagccaggatgaccgctttcataaattatcctcaatattattagatgcggtaaatgcatcagaatagaaatgttctacagagagatttttcatcataaagtcctttttactggcatcgatcatcacaggtgaaccacatgcatatatatcgaagaactctagagaatcaaaatcatccatcacggcatgatggacaaatccctttcttcccccccattcggcgtcatcaccagaaacaacagggatataatgaacgttgtcgtgctgttcactccactgctgcggtaatgcagagtaaaaatctttactatattgcattccccagtaaatgtagatctcacgacgacattttccctgaatgagatgctcaaccattgatttaactggagcgaatccagtaccgcctgcaaggaagattataggtctgtcactttcacgaataaaaaatgttccgcaaggcccttcaatgcgcataagagtattttcttgtaactccccaaaaatgagcgaactcatctgaccattgggaacattccttacatgcaactcaataccattcgactcatcactattagcgatagaataactgcgagttacacctttataatgtaaattgatatactgccctggaaggaagccaatttttgctgttggtggtgtgcgtaacttcaaagtcataacatcgcctgaaaccagtacagcactatttaccttgcatgggacaattttttttgtctgtccagctagttcaggaaaaaaatgcgcatttagctcaagggcggttttaggtttacagcagcaggttagtattttatcaccctgtccaaaaatattacctttggagtcaacaacttctcccgccaacaaatcggactcacagataccacaatcacccgctttgcagctatgttcaagatggataccagccgatagcgcagcatcgaggattgattcatcctctctaccggaaaattcaatatttgatggaaaaatcttaataatatgagacacgatgcttactctgttaacaaggcttgatccagtaaaggtgctgcagcatcttttgctgaaagctcaggcagctgagaaaaaggccattcaatacctattgcctcatcattccatagaatgctaccttccgatgaaggtgagtaataattagttgctttgtacagaaactctgcatactcactaagagtaacaaaaccatgagcaaaaccttctggaatccaaagctgtcgcttattctcagcagacagatttacaccaacccattgaccaaaagtaggcgattcttttcggatatcgaccgcaacatcaaaaacctcaccgacagcacaacgaactaacttcccctgtgcattttctcctctctgaaaatgtagccctctgagtacgttctttttggattttgaatgattatcttgaacaaatgtaactttacgtccaatcaactcttcaaaggtctgctggttataactttcaaaaaagaatcccctctcatcgccaaaaactttaggctctaagatcaagacatctggtattgctgttttaatcacaatcatcacttataaacctttcaccatcttcagcaaatatttgccataatcattttttgataatggcccggccagttctataacctgttgtgcatttataaaatttttacgaaatgcgatctcttccgggcaggacacttttagcccctggcgttcttcgatggttgcaataaaattactggcctctatcaaactctgatgcgtccctgtatccagccaggcataaccgcgccccatcatagcgacagacaatcttccctgctccatatagatacggttaatatccgtgatttctaactcaccgcgagcggaaggcttaagatttttcgccatctccaccacgctattatcataaaaatacagccccgttaccgcgtaattactcttcggttgtaatggtttttcttccagactaacggctgtgcccttttggtcaaactcaaccacaccgtagcgctccggatcgtttacatgataagcgaagacggtagcaccactttctttattaacggcagcttccattaactttggtaaatcatgaccatagaagatattgtcacccagcactaatgcacaatcatcatgaccaatgaactcttcaccaataataaacgcctgtgctaagccatccgggcttggctgtactttatattgaagattcagcccccactggctgccgtctcccagcagttgttgaaaacgcggcgtgtcctgtggcgtactgatgatcaggatatcccgaatgcctgccagcataagcgtggaaaggggatagtaaatcatcggtttatcataaattggtagcaattgcttacttaccgccatggtcaccggataaagacgggtgccggagccccccgctaaaataatgcccttacgcgttttcatttccatttctcattcatagaaaatgccctgatgggcatttaaatttattagatggttgtcgtcgtaaacatttcagtcagcatacgcttaactcctaattcccattgaggcagaataaggtcaaaattacgctgaaacttttcagtattgagacgcgaattgcctggtctgctcgccggcgtcgggtaggcgctggtcggcacagcattaagctcagtcagcgcaagcgttatccctgctttgcgcgcctcgtcaaagactaaggccgcgtagtcatgccaggttgtggttcccccggcaaccagatggtaaagacctgcgacttctggtttatttaacgccacacggatcgcatgcgccgtacagtcagccagtaattccgcaccggttggcgcaccgtactgatcgttaatgactgaaagtgtctgacgctctttcgccagacgaagcattgtctttgcgaaattattgcccttacctgcataaacccaactggtgcggaagataaggtgtttagggcagttatcctgcagggccttttctcccgccagtttggttttgccatagacattcagcggcgacgtagcgtccgtttcctgccatgggatatcgccggtaccaggaaatacataatcggttgaataatgcactacccatgcgccagtttcgttggctgctttagcgatggcttccacactggtggcgttaagtaactgcgccagttctggttcagactctgctttatctactgcagtatgggctgctgcgttaacaatcacatcgggacgaagcttacgaacggtttcggcaacgcctttcggattactaaaatcaccgcaaaactcttttgaatggacatccagggcaatcagattccctaccggtgccagagaacgttgcaactcccagcctacttgccctgtcttaccaaaaagtaagatattcattactggcgtccttcatagttctgttctatccaactctgatacgccccacttttaacattgtttacccattgagtatttgcaaggtaccattccactgttttacgaataccgctttcaaaggtctccagcggtttccagcctaattcgcggctaattttacctgcatcaatggcataacgacgatcatggcccggacgatccgcgacataagtgatttgttcacgataagaagtcgctttgggtacaatctcatccagcagatcacagatggtaaataccacatcgagatttttcttctcattgtgtccaccaatgttataagtctcccctgccttgccttcagtcactaccatatgaagcgcgcgagcatgatcttctacatatagccaatcgcgaatctgatcccctttgccataaattggcaaaggctttccttccagtgcgttcaaaatgaccaacggaatcagtttttcagggaagtgataagggccatagttattagaacaattggtaacgatcgttggtagaccataggtacgccgccaggcacggactaaatgatcgctggatgcttttgacgcagaataggggctacttggcgcatatgccgtcgtttcagtaaataacggcagcgtaacgctgttttcaacttcatcaggatgcggtaaatcgccgtaaacttcatcagtggaaatatgatgaaaacgaaaattattttttttatcttcgccaagggcagaccagtatttacgcgcaacttcaagaagtgcataggtgccgacgatattggtttcaataaatgctgctggcccggtaatcgaacggtccacatgactttccgcagccaaatgcatcaccgcgtccggctggtactgctcaaaaatacgcgttatttcagcggaatcacaaatatccgcgtgttcaaaattgtagcgattactttcagaaatatcagaaagggattcaagattaccggcgtaggttaatttatcaatattaactacagtgtcctgtgtattcttaataatatggcggacaacagctgatccaataaaacctgccccgccagtaataagtatcttcacttttctattccataaggcgtatttaatgtggtatttaatttgccaataaaaattaattgctcaagtcgttacacacgctaccgcccctggctcatcagctaccagtgcactgcgtacatatcgacttgttgcaaacctcgcccagcagggcaaagctcactaaaacttaaacgctaattgtcttattaattgcatccggaaacaaggattaatcttataaaatcagcattaaaatgctccagataaccccttgttacttaagccctttatacaaaactaaaacggcagtcaacactcgtttcagccaacttgccgcttcgaatgttcactgccgttattatgtttatcaccaaccatttatcacggttgttaatacttattcatgcaaaagctgctctatgctcttacggaacttggctccttctttcaggttgcgcagcccgtacttcacaaatgcctgcatgtagcccatttttttaccgcagtcatagctgtcacccgtcattagcatcgcgtcaaccgactgttttttcgccagttcagcaatggcatcggtgagctggatgcggccccaggcgcccggttcggttctttccagttccgcccagatgtcggctgaaagcacataacggcctaccgccatcaaatcggaatccagcgtctgcggctgatccggtttttcgataaactccacaatccggctgactttgccttcattatccagaggttctttcgtctggataacggaatactccgataaatcacctttcatgcgcttcgccagcacctggctgcgacccgtttcattgaaacgcgccaccatcgccgcaaggttatagcgcagcggatcggcggtagcatcatcgataataatatccgggagtaccacaatgaaagggttatcgcccacgaccggacgcgcgcacagaatagaatgccccagccctaacggctgcgcctggcgaacgttcataatcgtcacgcccggtgggcagatagattgcacttccgccaaaagctgacgcttaacgcgctgctcaagaagtgattcaagttcataagaggtgtcgaagtggttctcaacggcgtttttagacgcgtgagtcaccagcacgatttctttgatccctgcagccacaatctcatcgacaatgtactgaatcattggcttgtcgacgatcggtagcatctcttttgggattgccttggtggcaggcaacatatgcatacccaaacccgctaccggtataactgctttcaaattcatcattgtttcttccacctgtaaaatggttgctgaattatagctctttagcttgttttcgccagcatgaattactctgctgccagggataatgatggcacgctctacattacgtcttagtcggcaccataacattaagtatgaacaactttttcccaggaattttcgtaaaaatagcggtacttaccctccccgcttcggcagcgaaaaattcactgcttcgacattcacggtttggtgattaatcctgtcgatatccacggaactctgcccgttttcattgatggcatgaacattagcgagggaaagcagcgtgtcctggcgggccataaattgaccacgtacatctttacgcaaatcgaaatgcatttttaacgccgggccaatcgctgaagtttgcatcacgttgatattgcgcagaaagaggtgctgcggttgattatgcagttccagcgtagcacgcgtcatccgtacattggtgatggcgacaaaagagggggtgttgccggaggaaatttgaatgccgcgtaatttataagcaacctggcgattatccaaccgaatagcgtttaatttaaagttttgcggaattgacaggtattttcctttaacgacgccatagccgatgagcatcccggcactattcgtcatatcaatattatcaatgacgaaattatcacagccataaattgcgatcgttgcgttatcaatacccgcatttttactgaaaccgggcgtgatgtttttggctttgacattgcgaatgacgaaatgtttgccattttctacgtgcacaagctgtcggcaatcagatccggtaatattggccaccacaaagttttttactgcctggtcttcaggataactgttgtcataggtgctacccgccagcccgatgccgatcccccagttgattttgccattggtacaattaatgcgttcgatgacatgatcggaaatcaggatgtcgcggtcgtgaatcgcgacattccactcaatggcgtccccctgtaaatcgctaaagcggctatgcgtaatccgcgcgccatccatttggttatgaaatccctggcggagaatggcgtagttggcgtgggtaacggtgatgtcatcgataatgagattacgcatcacctgcggttccttaccaccgatgaaaatttgcgcgacggggccaaagccgctcatcgccacgcctttaatcacacagtccgacccgcgaacatccagcgtcacattgtgcagactgccgccctgctcccccaccacctgacacccgtcctgcaaaataaaccgtccccggccattcccacgcaccgcgccctgtacccgcagcgtttttcccgccggaatcgttatcgccgcattgatattttcacacacccatcctggcggtacgaccacggtctgtccgtcggcgaaggcctgtttgaacgaggcgataccgtcatccgccggataatccttaatatcgacggtctcgcgaggttcacgcgcctgtaccggcaaggcgcgcagaaaaggaagaacagcaagcgcagaacctgccgtcaggagggtacgtcgggagaatttagtcgcgggcataccacctcgtttatatcgtttgtagcaggctggctaactggcgattaatcgcctgctgattaaaatcttgcgccactttttcacgggcgcgcgtgatcaccgactccagcgtgtcgtggtcaatccggctgaactcagcgagtcgggccgccagcgcctgcgcatcgttttccggcaccagccagccggatttgccggcctccaccagttccggaataccgctatgcacggtagataccacgggaatccctaccgccatcgcctccatcagcgctaccggaataccttccatatcgccatccgtaccggtaatcgacggcagcaaaaaaacatcggcgtcatccagcatcgccttcacttcatggctcggtttaaaccccggcatctcaatgacatcctctagctgatactgctcgatgagcgtgcgcagccgacgttcccacgggccaatccccagaatgcggtagcgaaacgccacgccctgtgctttcagttgccgacaggcttcaatcgccacatgcaggccttttttttctgtcaggcgcgcgacggaaatcatctccagcggcatccctggcgctttcaccgaacgatgggtaaaacgcgtcatgtcgacgcccatgcgcgaaacggcaatcttttccggcggacagcccatacttttcaggcgaccggcccacagatcgctgatgggcagcatcagatcgccacgacgaaacaactgctgatactccggcgtgtaatgactgagcacctcacgactagagatatcaatcccgtggaaaatagtcgcgattttgccgcgaagcacgcccagttcgcgtagtttggccgccgtcacgcccgccggaccaaagtgtgcgataaacacatccgccacaaaaggctggctcacctgcgcgcaaatcgcggaaaggatcaaattgcgtgattcatcgccatagcgggtaaaattgagcgctttccaggtcgccgcccgatgcagccccggcagcgttttacatgcccggtagcgcagtttcgccagccgtccctggggctcatcctgtaaccagcgggttttcgccgccaggccatacttctcccaggcggcgtgagtatgttgggtatcgcctttttgtaacgcgacaatctccacctcatggcccatatcaataaacgcagtaatctgattcagcacaaaggtttccgatgagagtggaaatttcagcagaaaaaagctgactttcattgcgcctcccgaattctgtcgagaacagatttgatcatcgtgaaccctttcgcccgctcctcggtgacggcgttagccacttttgcctttagcgcaggcaattgattgagcgtatcggccaccacgctttgtaatgaaccgttcagcaagtgacggatatcgatggccaattccgccaggcctagctgctgcataatcccggcggatttatgttcataattaatggcgatggcgggtgtgccaaaattcatggagataatggcggaatgcaggcgcgtcccgatggtcagtacgcaggaggcgaggatctttccgatttccacgtcattgagttcgtccatcgcgatatggaaattctctgagtcgtttacatacttcgccatccgtaacgcaaccatccggtcatcgcggttatagcgatcgatactggtgcaggttgacagcgccagtacctgataaccgtccgcaatcaggcgattcacgacctgggcaaatgcctgctcataggcctgctgagtggtgcccaggcgtttatcaaacggctccagatcgcgcaacgtaatcgcgacggttttgcggcgcgcggtgacgtccagccagtgctgcacagcataactggcaacaaactcgtcgtgacggcgttcgactaaccaggcggtatccaccccctgctccactttccgggtatcgatctgcgcggcggtcatcagatcgcggctgacggtttcacgcaggatcagcgcactggtgcgcccaaaaacataattggcgagctggttaaagtcaggattctggaaagggccgacgctatgtcccaccatataaattggtttgttcgccataaacgcgcacagcggatattcaaagtgagtcaaaccgtataagtcgacatagtttgaaccgcccacctgaatgacggcgtcatactgcgcaataaattgcgcgaattcggcaaattccggcgcgatagcaaaattacgcagcgatccttcctgggcgactttagacaataaaattttatgctgaaaacgacggcgtaatacttttttcacccgaccgttaagccctgccgccgcctgctgtttctggcttaactgatacagcgggtcggcaataatcgggcgcccctgcaaccaggcggaactcaccgggaaacggctcatcacatccatctccgcctctggcgcctgttgacggatggcatcaagcaaaccgcgcataatggcgctatcaccacggttgccgcatgtgtggttgcctaaaattaataatttcataaatagcctcttatatccccgtcatccgacacgtaataactttttcatttttgcactgccaacaagctgatttttaatttccatcaccagcgcattgcgtgaaaaaataatcattaaaataaaactcaaaataccgaccataacctgtagcgcgaatacccccgacaacggtaaataaccgtcgaccagctttcctgcgccgtagctggtaataaatgttggcaatgagagataaaacggtagccacaggctgagaatatactgacgatagctggagccgagtaccggcttaatcatcacgaaatagctcagaatggtgttgatgatttgcaccaccaggaaccccagcgtcacgccaatcgcccccgccagatggccgccaatgagaattgccgggataaacagaaacgttttaaagacgttgaacttaaagctgatatccacgcgcgctttcgccatcagcagcgaaccaatcgggttgccgaccgagcgcaacagccccaccacgcacagcaattgcaggatcgggataatgctgttccacttctcgccaaacactaacggcacaaaattgttcgccactaccatcaggcccaacagcgcgggaaaattgataattcccaccacggaaagcaacttatagaagttgacgcgcagcttctcggtatcgtcctggattttggcgaatgccggaaatagcacgcgagtaatgatggggttaagcttcgccggcggcacaacagccacgttgtacgcgaggttatatcccccggcgacgcttgcgccgagaattctcgccagtaccagcgtcgataaattcgtgttgatgtaattgacgatactgtccgccgtcagccacgcgccaaaacgcaggttcgtggacaccgatgccagcgaaaaatgcagccccggacggtaaatcttgcggccaaagtaaccaaacagcagcgttcgcaccgcgctgttcaccagatagccgagaatcgcggttagcgccagcggccagtaatgggcgctaatcaccgtaaaggtgaaccccgccagcacggaggtcgtttcgatcatgccgatcttattgaactccagctctttttgcatcagagcgcggaactgctgcccgtgagggatcacgataaacgccagcgacaacgttttgattaacggcgcgagatccgggttatgcaaaacatgggcaatcgcatcgctcagccaaaagaccaccgcaaataccacaatcccaagcccaacgtttagccagtaaagcgtggtcagctccagatgcccaatcgttttacgctggataatcgagttcgcgatgccaaagtccgagatcgtgtcggccagcgcgataatcaccagcgagacggtcaacaggccaaactggtggttgtcgatgatccgcgccagcaccgtcatctgaattaaccccagaccgataatcactatcgtggcgatagccgaccatttagcgccgctgatcgttttttgtcgtaaactcattcttttctccagaacctgttcacaaggcatcattggcgcagccagattgaatacggacagcgcggaaaaaccggagcgtacacgctgccctggtgcaatatggcaagtaaaatagccttgtgggtcaggttcttaatacgccgctttattaacaaaccctttaaaaatcgtcagaaaaacgattttgatatcgaaccaaatactccattcgcggatgtattccaggtcgaattccacgcgtttttccattttctccagcgtatcggtctcaccgcgccagccattaatttgcgcccagccggtgatgcccggcttcatcttgtggcgtagcatgtaaccttcaatcaactgacgatactgttcgttgtgcgccaccgcgtgaggacgaggaccgacgatggacatcccgccagttaatacgttgataaactgcggcaattcatccagtgaggtacgacgcaaaaagttacctacccgggtgacgcgcggatcgttttgcgtcgcctgggtaacgaccttatcgttctccatcaccttcattgagcggaacttccagactttgatcggcttgccgtccatcccgtagcgcgtctgacggaaaatcaccggcccgggcgagctcaatttgaccgccagcgcaatgcagcacagtaccggtgagatgagcagcagaatcagcgacgccagcacgatatcttctgcccgtttaagcagacggttaatccctgatagcggcgtgtcatatagcggaacgaccggaacgccgctcatctcctccacgcgcgagtggagaatattaaaggtgaacacatcgggaataaggatcaccgagcaggtggtgtcggccagctcgcgcaccagttttttcaccatggcgccgtcgctcatcgacatggcgatataaacattgtgaattcgcgaggctttcgcatcgtcaattaactgctcgaagttcccggcccagtcagcagagacgccgcccggtttgggatcgtgatagacgcccaccacctcaaaacccagccacggctcattacggaagctatccagcaacgcctggcccgcaggcaaatctccggcgacggcgacccggcgagtgttataaccacgattgcgtagccagcccgcgccgaaacgaataaatgaacggcataacactaagcccaggctggacaacgcataccaggccagccaggtggcgaggcggttgtcaaagtcatcattaaacgccaccagaccggcgctgaagatcaggctcagcgtccagttttgcagtaacagcgttaactctgtcgacattttgacgccgcgccaggagcgataaaaatcggttatcccgcccagcatttgaaaaacaaccagcgtaatcagcgccaccaacaggtgcatgtacaggaatggcagtccactgacttcacagatgaaccacagcccgccaaacatgatggtgatatctgaaaagcgttgcaccatagagattaacgatgcattggttttggctcgttcgcgcttttttagatttgtcatcgttgttcctgtgattggccccttacccgcaggcggtaaggggagatctgacgttactgattcagcagcgccagcagagtgcgtgttcgcgcttccatcagcggaatatcgccgcgtgattccacattcaggcgcaccaccggttcggtgtttgacgagcgcaggttgaaacgccagtcggcgaacgacatgctgaggccgtccgtgcggtccactgcctgcgcctcttccgcaaagtgcgcttccacccgcgcaatggccgccgccggctccgccagtctgctgttgatttccccgctcgccgggaacgccgccatccggtcgcgaaccagctcacccagcgactgtctcttcaggcacaccagctccgccaccagcagccacgggatcatcccgctgtcgcagtaggcaaaatcacgaaaatagtgatgcgcgctcatttccccgccataaatggcatcctccgtacgcatccgctccttgataaaggcgtgcccggtttttgacatcaccggcgtcccgcccgccgccgtcaccactgcctccgtgttccaggtcaggcgcgggtcgtggataatcttcgcccccgggtgtttttccagaaatgcttccgccagcagcccgacgatgtagtacccctcgataaactgccctttctcatcgaacaggaagcagcggtcgaagtcgccgtcaaaggcgatacccatgtccgccccgtgttcaataacggccttgcgggtgtcgtcgcgacactccggcagcaacgggttgggaatgccgttcgggaaggtgccgtccggggtgttgtggattttgatgaactccaccggcgcgcccagcgccttcaggcgcgcttcgatggcgtcaatgaccggccccgccgccccattgccggcgttaaacaccagcttcagcggggtgagattgttaacactgatatagccgagcaggtggtcgatgtaggcgtcgcgcaggctgatttgtctgtagctgccgcgcgcggcctcgttcaccggcgggaagtcgcccgcttccgccagacgctgaacgtcgcgcagaccggtgtcgccgcttatcgggcgggcgccctcgcgcaccagcttcataccgttgtagtccatcggattatggctggcggtcacttcaataccgccgtccacgccaaggtggaaggtggcgaagtaaatctcttcggtgccggacataccgatatccagcacgtcgacgcccgcgtcctgtaaccctttcgccagcgccagcttcagcgcctcgctggtcaggcgcacgtcgccgcccagcacgacggttttcggttttaaatattcgccgtaagcgcggccaatccgccacgcgatatcttcattgagctcttcgcccagcctgccgcgaatgtcgtaggccttgaaacaggttaattttgtcatgtgcttccccttcttcaggcaacagttagccctgaccgtaaatggccagcatcgttattgttattcattgccggatggcgcgttgcgcttaccgggcataattgcaggcgtcagacccgcccgtaacgatcctcgaaccgcaccacgtcgtcctcttcgagatacgagccggaacgcacttcaattaaatcgagcggtatttttcccggattttccaggcagtgggtcgcccccagcggaatatagatggactcgttttcaccgagcagcttaacctcgccgttgatggtgactctggcggtccccgccaccaccacccagtgctcggcgcggtgatggtgcatctgcaccgacagtccttcccccggcttgacggtaatacgcttcacctgatagcgctcgcccgcgtcgatggagtcgtatttgccccacgggcggtaaacctcgcggtgcatgtggtgctcatggcgtccgtcggccttgatcttctccaccacctttttcacgtcctgcaccgcgtggcgatcggcaatcagcacggcgtctttggtctgcaccaccaccagatccttcacgccgacggtggtcaccaggccggattcggcgtaaacgtagctgttttccgttttatggctgatgacgtcgccgtggtggacgtttccctccggggtgtgggcgctgatttcccacagcgaggaccacgagccgacatcgctccagcccgcatccatcggcatcaccaccgcgtccgccgttcgctccatcaccgcgtagtcaatggactcttccggacaggcgaggaaggcctcttcatccacacgaatgaagtcaagatccggatcgacgccgcgcatcgcctgttcacaggcggccagaatatcggggcggaactttttcagctcttccagatagcgtccggcgcggaacagaaacatgccgctgttccagtagtaatcgccgctggcgacgtaggcctgagcggtttccagccccggcttctcaacgaactgcgccacctcaaaagccaccgcatccgtcgcgcccggcacgacatcaccgcgccggatatagccatagccggtttccggcagatccggcacgataccgaaggtcaccagtttgcccgcgtcggcatagggcatggcgccgcgcaccgcgtcgcggaaggcctcttcattggcgattgcatgatccgccgccagtaccagcatcagcggatcgcagtccgtatgctggcgcgtcgccgccagcgccgccagcgcaatcgccggcgcggtattgcgcccggcgggctcaagaataatgttctccgtcagcttattgagctggcggagctgttcggcaacgataaaacggtgctgttcgttacagatcaccagcgggctttcgcactccacgccgttcagacggcaaatggtggtttgcagcatggtgagatcgcctttcaggcacagaaactgttttggataaagcacgcgagaaagcggccacaatcggctaccggagccaccggccatcacaaccgggtaaagttttgtctgacgcattatcatccccgaatatctgcaataaattggcgtagcacgttctctttattgagcgtgcgttcggcgtattcacgtgccgtcgtgttgtttttcggcatggcgagcgcctggctaatcccgttgaccagcgcgtcggtcgactccggttccacgcaaacggcgatgcccggatagcgcgcgcaaagttgtcctaattcggtgtgcggctcagcggtaatcaccgcattaccgccgaccgccagaatgttagtcagcttggagggcagtaccgcatccgccgcgccgcgcttttgcaccaccagatggcagtcgcccattttcagcagcgcgggtaaggcgtcgtaaggctgcagcgggaggaatttaatatttgccaggccgcgttcgcgggccatgttctccagccgcgccttgccgcccccctggccgacaatcgcaaaaatcaacggtcgatcgcgtaatcgttccgcggcgtcaattaccttttccagcccttgcttttcgccgatattgccggaatagagcacaatttttttgccctctggcaagccaagctgctgacgcaaagccgtcacgtcagcgtcattaacgtcctgaaagcgcgccacttccgaccagttcggaaaaaagaggattttttccgccgcgacgcccttttcccgcgctttattcatcatggagcgagagatggtcgaaacattatcaacgttacgcagcgcgctgcgttcaaaggccgtcgctaaccgcgctacgctgccgcgcttgccttttcccgccattcctaagccgagcatggcgtccacttcgtaatcctgaatatgcagtacggtacgcgcgccggagagtgtcgccagcagacgcattcccggcgtacaaaagagcgtcggtacaacgccgataatccgatccggcttccagcgacgctgcgccatcagtgggaaaaaactgctcaatgcaaagctccccagatgaagcagtcgttttaaggtggagggctgtttcggcacatacagcgggcagcgccagacggtagcctcgccctcttcccggcgatagcgccaggcggaatagcgctcaccgaccttccactgcgggtagtacggcggcgcagtaatgacccgcacctcatggccttcctgcgccatccacgccaccatttcgccggtatatttgccgataccggtcagttccggcgaatagttaatgccatagaccaggatcttcataggcccaccgccggcgcgtcaggagagaagtaggcccgactgttctcatgaacattgtcgcttgccagaagctgttccggcgtcagccagcggtaactgccatgctgggcatcaggcaggcgtaaatcgctctccgccacgcgcagacgaaagccgagcacgatgtagtgagttgaaaaatcctcaccggaaaagttgtcgtcatagaagtgctgccagacgccataaaacgtccctgccgccagcggcagacgcacgcccagttccgcctgcgtcaggcgtgcaaaggcggcctccagcgtttcgtctttgcacacccgcccccccggcacaaaccagtagccctgcgccggacggttgagacgctggcccagtaaaatttccccctggccgttttccacgatgaaatcgagggagatgaggggcgtggcccgcaccacggcggcgaaatcttcctgacgtaaaaacattgtcacccccggaaccgttgctgattctcaaggaaccactggtaagtaccggcaagccctgcctccagtgaaatttcgtgataccagccaagctgatgcaggcgcgtgacgtcgagcaatttacgcggcgtgccgtccggcttcgcggcatcgaacaccacccggccctggtaacccaccacctttgcgatggtctgcgccagctcgcggatggtgcagtccacgccagtgccgacgttaatgtgcgacagcatcggggcagtgttctcctgccacacttcgcgcgccagctccatcacgtgaatactggccgccgccatatcgtcaacgtgcagaaattcacgcatcggcgtgccgctgccccacaccaccacctccggcgcgtggctctgcgcagcctcatgaaagcgacgcagcagcgccgggatcacatgtgaattgtccgggtggaaattatcatgcgggccgtacaggttggttggcatcaccgaacggtagtcgcgaccgtactgccggttgtaggactcgcacagtttaatcccggcgatcttggcgatggcgtacggctcgttggtcggctccagcgtcccctgcagcagctcgctttccgccatcggctgccttgccagtttcggatagatacaggacgaaccgagaaacagcagtttgttcacgttgtgcaggtgcgcggcgtgaataatgttgctctctatcatcatgttttcataaataaaatccgccggatacgtgttgttggcgacaatgccgcccactttcgccgccgccagataaacctggtcgatacccgccccggcaaagaacgcctgtaccgcgcgcccgtcgagcagatccagctcatcgcgggtgcgcagtaccagttccacgtcgccgcgctgcgcaagctgccgtacaatggcggagcccaccattccgcgatggcccgccacaaaaattcgttgcttattcattctcaggactccagcgcgatggccacctcataaccgtgagatttcaacagtgagtgttttttcgcggcctccagatcgttcgccaccatctcggagaccatctccgacagggtgatttccggtttccagcccagtttctcatgcgctttggacgggtcgcccagcagggtttccacttccgccggacggaaataacgcggatcaacggccacaatcacatcccccggtttcacgcccggcgcatcgtgtccggtaacggataccacgatccctttctcattaatgccttcgccttcaaagcgcagttttatccccagttgcgccgctgccagctccacaaactggcgtacggaatactgcacgccggtggcaatcacgaaatcttccggctgctcctgctgtaacatcatccactgcatccgcacgtaatctttcgcatgaccccagtcgcgcagcgagtccatgttgccgagatacaggcaggactctagtccctgggcgatattggcgatggcgcgggtgatcttacgggtgacgaaggtttcgccgcgacgcggggactcgtggttaaacagaatgccgttacaggcgtaaataccgtaggattcacggtagttaacggtgatccagtaggcgtacagtttcgccaccgcatagggggaacgcgggtagaacggcgtggtctctttctgcgggatctcctgcaccagcccgtacagttcagaggtggaggcctggtagaaccgcgttttcttttcaagaccgaggaagcggatcgcctccagcaggcgcagcgtgcccatcgcatccacatcggcggtatattccggcgactcaaacgacaccgccacatggctcatcgcgcccaggttgtagacctcatccggctgcacttcctgtaaaatgcgggtcaggttggaggcgtcggtcaggtcgccataatgcagatgaaatttcgggttgcagctgtgcgggtcctgataaatatggtccacgcgctcggtattaaacgatgacgcgcggcgcttgataccatgcacctcataccctttttccagcagaaattctgccaggtaagacccatcctgtccggttacgccagtaatgagagcgacttttgacattttcatttcctcaaatagtcccgttagggagtaactttctgaacgcgctggcgcgttaccactgcgggattgccccgacaaatcgcatttgccggtaatgatttaaatacgctgctgcgcgcgccgacgacggtgccatgacctatcgtcacgccgggcgcgacaaaaacatcggtcgccagccaacatttttcgccaataacaatcggcgcggcattaatatcgaaatgggcgctggtataatcatggctaccggtacacaaataccctttttgtgaaataaccgcatgtgcgccaatattaatttcacccaacgtatataacacagcgtcgtcgcctacccaggcataatcgccgacggttaatttccacggataggtaatttttactgacggtcgaataaccacattctttccaattttggcgccaaacagacgcagcaaaaaggctcgccagcgatacaatatttgcggcgacccggcgaataatgtcgcctgtaccgcccaccataattgtacttttagcgcattagcgccgcggaaccccttcggcaccgtaaagccgctaagatcctgcataataactcccggtgattagactttgttataccgcgcttttgttttacccgtcgttttcagacgtaataaataggataattgcgcccaaaatcctggcacacgtaatatttttcgctgtacgttttttgcatcctgacataattccagattattcgaggttgacacgccgcccattgaaaattcagataccagtccgttaattcgccgaaaaggatagcctgctttatagagacgggccgccagcgcataatctgaagagacatgatattgcagatcataaggatacttttttaacgctgccgtcgggaaaaatatcgcctgatggctggctggcaaactatggtagatataatacccgggtttagccttccggcgtattttatgcccgccgccaaaatccagcagcgcgtcgccaatatacatcgcctcgcccttttgtcgcgccagttggcggacaaacagcgcggcatcatcatggaacgcatcaccggaattaagaaacagggtatagcgcccctgcgccaaggcaatgcctttgttcatggcatcataaataccgcgatccttttcactgataaaacgcaggttaaactcaccgtgacgttttcgcagaaattcgcgcgtgccgtcctccgaaccgccatccactacgatccattcaaatgacagacccggatcgcgcgccagattgcgcagcgagcgccaggtttttaccaccccttcgtaattgcgaaaggcgacggtaacgacgcttaaaaacatgcaaccaccccgttatgaaatttttaacgccttgcgcaaaatgaacggacagacgattaaaaaagcatattccgggctaaatattgaaccggtaaaaaacagcgacaccggcgtaaaaagatagagctgcacccgaaaattgcgattatcgccaaacgcatttagcgccatttttaaaactttccccatataccacagcgtcattagcactgcgaaccaggaaaaataaataatcagtagatacaatccattgtctatggttttcccgacatccgcaccgttaaagattccgaatgatgcaacatattcataaagtgagccaaatctgactacaccatcaatatgggtcaaggaatatccgaccatgactaaggggcccacaatacgataataagaagatgagccttccgtccctaaatcgccaagtcgtgtcgcgatataaggaaatgcaataattaccccaaccaaaaacagggttaatgagaccagcgccagtggaagttttttctttatcgcatccttattcaaatattggaacgcccactccagaaggtaaaacaggataaaggtcattacccctgaaaatgatcctgataatattatccctgccagaatcatagcatcgcttttcggtgttttgataccaaactgtttgatgctcagccaaattgagattagtgccaaagcgaaaaatgccggttcaaaataaagcgcagtggtacgcttaccgccaaattttatgaagttcagtacgtagctattactgtaaatgagatatttcgaaattccttccataatactgctgccgccggtaaggataatttgcgccatctccaccgcggcgagcgcgaccaccatacccaccaccagataaaaaaaacgcaaaatctttcggtggttatgcgcggaaatggttttgaatcggatactccagaccatcccgataatgaccacaatatagacaaacagcatcgtggacgtgacatatttaccggcattcagcgactggccgaacaggaagttaaatgccgtaagccccgcgccgatgcctaaggcgatcatcaatttttttacgctaatgcgttccacaaataacagcagcaacagcggtaaaaaagtgacgatggtaatgggaaagctttcccccagttgggcaatcttgacattgaccagtaggtagatcagcggcagcagcagatagctacagattctgatagaacgagacatactcctccagcatctgttgaccgctgtacgcgacgcggctacgcatacgaaaggcgtccagcgtggcgccaaataccgcctgagcaatctctggcttacgccgctgcgccaggcgcagtacatctgtagcggcaaaagtctggccgccggatttcgccagcacctcctgcgccgcctcgctgtgggtggcgattaccggtacgccgatcgagagcgcttcacacaagatcagcggatagttatcgacccgcgagctaaagaccagcgcatccatctcattgagcgcgctcattaatttgcgcttatcggtttcaaaaccgtgattaacaacgttttggccggtaaaaggcgaaaatttaccgaaggtatgcagttcaattttttcgcccagcgccatcatgtcgtgtaccagacgctggtcagttttgccgtcataacgcaagtcatgcgccacaatggcaattcgcggttttcccggattcagcggcacaggtgatagctgcgcgagaatcgcctcggtcgccagatcgataccgttgttaataatctggcagcgccccgcgccataaacgctgttaaaggcctcggccacgtgctggctcggcgaaataaaccggcagcccagccgcagcatgtcccgaaagcgctgacgtttgccgtcaataagctggtgcgcccgatccaccctaaccggcggataattgcttagggtcgggcatttttggcagccgcttttccagccctcgcaaccgtcggtgaaggcgcaacgcccggtgacgctccagtgatcgtgcaacgtccagaccagcgtgacgtctggtttttgcgctttgactttttcgcaaaacgtcacgatgtccgccaggtttagccagtaactgtggagaacatgaaaatgcagcaccagcgggccggatgtctggataaccgtgcggtaaagattgtcgagattgccaaacagatcgcgattcaggaaacgaaacagcgcgatattagcgattgccgtgccgcgcggcgtctgttttatcacctgcggataacggtggtggctgacgcttttttttccgcctttgccataaccataaacaaaatgcgacgtcagccctttttgcagcgcccgcagatggagatccaacgccactcccgccgcgccgccttccgccagccgtacattaaattgcagaatattcatgtgctgaccttcacccgtgctttttctcccaccaccagcgcatgatccggaatactgtcaagcaccacgctacccgcgccaatcgtgacgtgattaccgatagtaatatcgccaagcaggatgacattcgcccccagctcaacgccgttaccaatcaccggacaagccaggctgtccgcgccgcgattgccaatggtgacgccgtggcgaatggtaaaatcgtcgccggcgacgacatgtttgttgatcactaccgcgtaaccatgatggatagtgaaccgccgaccaatggtcgcggcggcctggatttcatacccgaacaggcattccgtgatcacgcgatacagcaccagcaccggcgcggcccacagattattcagcacattctttttgcgccagacggaacaaaaatgagcgatacggtaggccagcaccatgcaacaggggcgtaagctccagctattcgcgcgtaagtcttccagcatcgttatcgcccccgcagcccggccgccagacgtttgctattacgcacggagagcaacgtcagcaacgtgcgccaggtcattcgcttattgcgaatttggtacagggtaaaaagctggtattttttactggcgcgatcgaatttatctttgtgcttacgataaaaatggaaatagccggagaactttttcggcgaagaggtaatctgcatctcgccgtggttgatatgtaaaatttgcgtcgcctcttcgactttccacggttcgccatactccaccaccatgcgcagaaaaatgtcgtagtcctgcgccgccttgagttcggtatcgaacaaacacgctttaaaacgccaggcccaggtaaaaacctgattgccaataatattgcgcttgtagaataagcggcgcgaataaggggatttcggatacagcggcaggctggcaggctgagagtagacctcgccctcgcacacatagtcgttggcatacaaaaaggcgtgcgtagtcaactggtgtttatgggccagaaacacgctcagacggtttggcgtccattcatcgtcatcatcaataccggtaatgtagtgcccttgcgcctgcataatggcctggttgcgaaccgcgcaggcgccggtattcctggcgttatgggtataacggacgcgcgggtcgttcagctcctcaacaaattgttgtagctgctgataagatgaagagcaatcatccacgatgatcatctcccagtgacggtagtcctgacgtagtactgatttaatcgcccggatagccaactgctgcctgttccaggttggcatataaattgagatcagcggattgtctgttgtcatgcttattccccagatagttttgccgcatggcgctacgcttgtccggcctacagtctcaggccgcgccatccggcacgccttattttttatttggaatctgactggtattcatactcgtaatagccataatcctggtagcccgtcgcccggcggaaaatggagttgagaatgacgcctttgacctgaatgccattctggtcaaaacggctcagactggtttccacctcttttaaggtgttgacggcataacgcgccaccatcagcgtcgtcccggcgtggcgacccacaatcgcggcgtccgtcacggccagaatcggcggcgtgtcgattaataccagatcgtagcggctgcttgcccaggcgatcagctcgccgaagcgctcgctcatcagcagttccgatggattaggcggcacctgaccgcgcggaataagatcaaaattagcgatcgccgtgggtttcgcgcaggaggctatctcgcctttgcccgccagaatgtcagataagccgtccacgttattggtgccgagcagttcatgggtgtagcccttacgcatatcgcagtcgatcagtaatacccgtttatgcgtctggctgatgacggccgccaggttggcgcaaacaaaggttttgccgatagagggactgacgcctgtgagcatgagtacattattttgcgcctgcatcatggcgaaatgcaggctggtgcgcaggctgcgaatcgcctcaatcgccagatcggtcggattgcccaccgccagcagttggctctgcttgtaacgcttaattcctttaatggttttgacgctatcgcgcgctttttgccattccgacagcggaatactggcatagacgctgatcccgtgctcctccagcgcctgcgggctttcgataccgcgattaaacagcgagcgcagcagcacgccgacaatcgataacattaatcccagaataatgctgccgagaataatcaacgcctttttcggcttcagcacgcccggctgggtaatcgccgggtcaacgatgcgcacgtcgccaacggtgctggcttcggtgattttcagctcctgctgtttattaagcagttgcatatagacctgctggccggactccacatcgcgggtcaaacgcacaatctcctgctgggttttcggcattgccgtcacccgcccgttcagtttggctttttcatcttccagcgctttacgtttttccagcagggtgcggtaagccggatgcgctttggtaaagagcttggaaatttccgcctctttaaacgtcaactcattcaactgggcgtcgatattaaccatcgaatcgagcaccgccttcgcctccagcggtaaatccaccgagtctttatcctggcggaaagcgtttagcttgttttccgccacatccagacggctgcggacttccggcagttgttttgccagaaacgccaggctcttccccgcctcttcagatttccgcgcaatatcctgttgcagatagttacgggtaatactgttgagaatttcgcggatctggtcgcgatcctctcccgtgaacgtcaggctcagaacgccggtatctttgccggtttccgttacggtgaggttattttgcaggttattaatcatgccaagcgttgagaatttactcaccgtaaattctgtatcaggacgggcgtcaatcgcctctacccgcatcgtcacgccgtctttattgagtggctggcccacaacgccctgcgcgctaaatccgccgtcgctaaccaactgataacgtttgtcgcccagcactttgagggtgaagatctgtccgctcatcgtctctggtcgggtgaatgtcgtgactttcaccatttcattgtgacgtcccatcagccgttcccacccggcgccgaacagcggaaaggtgtttttggtgacggcaatatccagatccagatcgtcaacggtcttccccagcaccaggcgcgatcgaatgagctgaatttccgcatcggaagccggcggcttattcgctaatgcgctattgatatcctgtaccagcgaattaccggcgttttgttcaatctgtaccagcgcatcggcgctatagatgggcgtggcgaagaacgtataaattaccgcgcacagcgcaaatatggccgtcgtccccaacacccaccaacgcgcttcaatcaccgttccgaccaggcgcccgatatcgatttcatcgctacccgtaaccgccgcagattgttttgctttttctgtcatggttttccctgctctgcattcagtgcctgcgcccactggcgggcagacctttccagtaatgtgtacaccgcctcaaacgcatcgcggcttttgcgatacgggtccggtatttcacgctcgctgtcccagtgaccaaacagcattaccttgccgcgcatttccggcgcaatgtcgcacagggcggcgatgtgacgtttctccatcgtcagaatcaggtcatattcccggcacagacgcgcggaaatttgccttgcgcagtgattttccaaagacagatcgtgggcgctcgccacgctcgccgccgcaggatcggcgcctttgccgaccagtgcgcctaatcctgcggacgcaaccgtcagcgagggatgaaagcgttttagcaaacgttccgccgtcggggaacggcaaacattccccacacagaccactaagattttgttaaacataacgattaccaggaatgaatgtcgctggccgtatccgtcatataacggacaccgctaatggttggcagcaactgattgatcagacggttccagcgagcaaccggcgcggtcgtgacgtacaccacatcgtaaggctgaagtcggaattccgtcgccatcaccaatgacgtggcgtcagacatatcaagctggtagatattggcgatcttgccgccgcgtcccccctcgcctttcaacggacgaatcacaaaaatgccgctggcgttggaggtggtcagatcaatgccttccgcattgcctaatgcttcggtgagcgtcatgccgctgaaatccattttgagggtgctctgttttttcacttcgcccatgacaaagactttcagatcgtcattgcgcggcacatacagaatgtcgccagggtagagcaagcggttctggctaagatcgccattttgcatcagcgcctgtagcgaaatgcgctgttctttgccgttgtgcgtcaacacgacgttgcgccagtccgccatatcggtcaggccgcccgcagcgttaatcgcatccaggacggttagcggtacgttagtaatagcctgctgaccggatttattcacctggccggagatgtacgctttttgcgagcggaaagcggcgatattgacatccacctgcgggtccgcaatgtacttcgctaaacgcccggtaatatcgctacgaatctctgacaaagttttaccgacgacgctaaccttgccaatgtagggataaaacatggtgccgtccggctgtacccagttgccggtatcgcttgagctacggtactggcctgctggcgtggtcaattccgggtgatcccagacggtgacattcagcacatcgccaggcccgacgcgatactgatagctggcgatctcctggtccagcgacatattcggttgcgcgacattgggccgcgggcgtaattgctcaaccaaccgtggcgtcagcggatacacattgaccatccggtcgagatcaaagtcagcgtcttgctgtttgatcacatctttccccatcgtagacatattgctgcccggaagtactgtgcaaccacttatcaagctgagcgacgccaataatggcatcaatttcattttggatttcatcattgattatttatcactttggcagagtcattatcctgtgcaatttaaatagcggcttcgtccgtgcacatttaccttgcagttaatagcagagaaaattaactggcatcattctgaaaaaaaatcaattcatccgcaggctattgacagaataataaaggcttatattcaggctttcaggcacgctaccgcccctggcttcttagctaccaatacactgattattctaaattttcgcattcccctcagattttatcctcgttcagataaaaatcttcagcgaaataaaggttacgtattaatagttttctcgatgtcgtgacaggatatttaagcgcgctatcttaatcctgcaagaattgttgcagctaacctaatgacaggcaaggtaacaaacccgccattctatatttttaagattaatattaaatgaattaacagatgattttaggattttattgatgttgacaatatttatttactccactccacctgcgatatttcctaaatatattcttgacattatttagtttctgacagaaacattacggctattttaaagttattttatagccgcgtaacaaagataaattgcgctgcggcattgcatttttccgccgtattatccatgatcgaattgtgacaattgtcatattacagaaggtattgctcttactatggaatggattgccgatccgtcaatctgggccggactggtaacgttaatcgttatcgaacttgttctcggcattgataacctggtctttattgccatcctcgctgaaaaactaccgccggggcagcgcgaccgcgcgcgcattaccggcctgatactggcgatgatcatgcgcctgctgctgctggcgtcaatctcgtggctggtcaccttgactaagccgctttttagcgtacaggcgttaagctttagcgcccgcgatctgattatgctgttcggcggcttcttcctgctctttaaagccaccatggagctcaacgaacggctggaagggaaagatagcgccaaccctacccagcgtaagggggcgaaattctgggcggtggtcgcgcaaatcgtggtgctggacgctatcttttctctcgactccgtgattaccgccgtggggatggtcgatcacctggcggtcatgatggcggccgtgataatcgccattagcctgatgctgctcgccagcaagtcactgacccgatttgtgaacaaccatcccaccattgtcattttgtgtcttagcttcctgctaatgatcggctttagcctggtggcggaagggtttggtttccacattccgaaagggtatctgtacgcggctatcggcttctcggtgatgatcgaggcgctcaaccaactggctatttttaaccgccgccgttttctttccgctaaccatacgctgcgccagcgcacaacggaggccgtgatgcggctgattagcggtaaaaaagaggatgccgaactggatgcggaaaccgccgcgatgctggcagaccatgacgacagccagatttttaatccgcaggagcgcaggatgattgagcgggtgctgaatctcaaccagcgcaccgtaagtagcatcatgacgtcgcgtcacgatatcgagcatatcgatctcaacgcgccggaagcggaaatccgcgctctgctggaaaagaaccagcatacgcgtctggtcgtgacgggtgaaaatgaacaggaagatttactcggcgtcgtccacgtcatcgatctgttgcaacaatcgctgcgcggcgaaccgctcaacctgcgggcgctgattcgccaaccgctggttttcccggaaacattgccgctgctgcctgcgctggagcagttccgtaacgccagaacccattttgcctttgtcgtagatgagtttggctcggttgaaggcattgtgacattaagcgatgtcatggagactattgccggtaatctgccgaatgaagtcgaggaaattgacgcccgccacgatattcagaagaacccggacggttcctggacagcaaacggccatatgccgctggaggatttggtgcagtacgtgccgctaccgctggatgaaaaacgggaataccatacgattgccggattattgatggaatatttgcaacgcataccgcaaaccggtgaagaggttcaggtgggcgattatttgctgaaaacattgcaggtagaaagccatcgagtgcagaaagtgcagttaattccgctgcataacggcgagccagaccaggagatgtaacgtctgttcgcctgccccggtctgcttaccaggcaggccggaggcgcgttagcctcgccatccggctctgccctttggccaaaaactacagcttattcagcagcttcttcacatctttaccgttgcgggtatctttattgcgatccgcccagtcattgagccgacgcttcgcctcatcctgtaaatgcttacgcaataactgatccacttgcagggtatagttcagctcctgccacttgccatagacgcgcaacggcaccggcgtctctttcaggaaggtgatcaggttgctatcgccgttccagccgcccagcacacgcagattaaattgtgtatcacagctctgcttaaccagatccagcgttccgctgccggttaacgccagcatagaagattgcccgaccatgtcgtcgagcgtcagcgtgcccttatttagcgtcagatcggtcgtgaagcgatccagtcgggtcgcgttgtccatattttcctgcgactgctgcgcgtcgccgccgcttcgctctacggcctgctgcaccagttgctggaaattcattccttcaaggcgcgtattgctcatgtcaacatgcgcttttcctttccagctatggcgaaatgcctctgcgtcaatatccgccccggagaaatcgccaaccagcgacatcttaccggtcaggctaatcggataattgaaggctttcaggatagtcccaatctcaacatggttgaggcgagggtggaattcgatgcgcggactggcggtgcgggcgtccagcgtgccgggcagcgacatctctccgtcggccagtttcccctgcaaatcagtaatatccagcaatccggcctgattagacatcttcgtcgaaacctgggtaaagtccattccccgccagcgaactgaatccgcctgtaaagcaatctccgccgtaaagctttgcagcccctgataaggcggcgcaccaacacgcgacgcgataactggcctggtcagggggagcgtattttgcccctgcgacaccgcgccgcctgtctgagccacggcgctatgatgcggcaacaggttgtccagattaagcttgctggactggaggtcaatttgccattccggctgctccgccagcgttacctgaacttgcccggtcagagaactgtcattcgccgttaaatttaagtggttaaatgaaagacgtttttgcgcctcctgccactgcgcctgcaattgtccctgcccctcaatcccctgcgctggtagatccgcgccctgcaattgccagcgcagttgctcaatacccgcggttaaattatgcgggtaatcggaagcatccaccgttccgctgaacgataaagcaagatcccgctgatcgcggttcacgcgtcccgaaaaatcaaacgtgccgcgatgctcggcatcttgttccatattcagacgaatatcgcgcaccgtgacctgatcatcattttcatgctggaaaaccagcacgctgtcggcaacgcgcaggctacgaatatcaaacgaccagccgcgatcttccgctacgtccggcaaggtattatctttcggcgcgaccggcgcatcatcgctgcgtaccgcttccgtttgcggcgtcagttgaatcaccccgcctttcagcatcacctgcttaacatgaagctgatgactcaatagcggccataaagcaacatccaggcgcatattgtcagcccgcaccagcggttcgctggcgcctcgcgccgttagcgtcattcgcccggaaaggatactcagttgcggccatacgtgccagcgcagcggcccgtcaagttgcaactgatattcactacgcgcggcaacctgctgcaccatataggcgcggaaatcattcggattgaccaacaataccaacgcagagaatccggccaccagcacgaccaggagaatcatcagcgtcgtcagaaatcgtctcatgctaccctcaatggaccggcagtattgcgccgaatggctcagtctttatcaatccggctggcgacagcgccctgctgatcgcgatatttggcatcctgacggcggttataaggccgcgccgccgggccggacagcggctcaaaactcagcgcgccgatgagcatacccggacgcaacgccagcggcagcttcccggagttgtaaaactcaagcacaatgcagcccgaccagccgggatcgatacggtgcgccgtcacatgcaccatcagccccagacgcgccagcgaggagcgaccatccagccagcccactaaatccggcggcagggtaacggattcaaaggtaacggccagcgccaactcgcccggatgcagataaaatgcctcgccgtccggcaaaacgatttcatcgctcatcacgcgatccagcgccgcgctgacctcatctttaggcccgctcagatcgataaacgccgccgtatggccacggaaggttcgaaatttattgccaagacgtacatcgaccgtcgcgccgttaatgcgctctacgggaggtcgcggggtgatagacaaacggccttcatccagccaggcttcaatatctcggtcgcataaacgcatggcactttctcctttcgcgcatcaagcccttaaatcaagcacatcaagggctaaccaggttatcactgaacggtacacaattcgccagatttattcaaagaactggctgattttcgctttcagaatatcaatagcgatgcggtttttaccgccgcgcggcacgataatatccgcatattgtttggaaggctcaataaattgcaggaacatcggacgcaccgttttctgatattgcgccatcaccgaatccattgagcgaccacgctcgttcacatcgcgtttgatacggcgcatcaaacagatatccagcggcgtatcgacaaaaatagagaagttcatctcttcacgcaaacgcgcgtcggtcagtaacagaataccttcaagaataatcactttcttcggttctacgcgaaccgtttcctgcatacgggtatgctcaacataactgtataccggtaattcaatcgccgaaccgcgcttgagcgcctgaagatgctgaaatagcaggctgtgatccatcgcattcggatggtcatagttagtttttacgcgttcttccatcgacagatggctttgatctttgtaataactgtcttcgggaataacgccaatatgttcgtcacccacttgttcacgcaattcgcggtaaagggtactggcaataagactcttgccggaagccgatgcgccagcgataccgataatgacgcactgatgagactgatcagtcataaatttagcgacctgattaacctggatgtaaggaaggggggcgccgaaacgccaaacgcggcaattatagggatttcagcagcgcgataccagtccggcgctatgccacggtgaatttgttggcggcgcattcgacgtcgcgacgtaaaagcgttcagttttaacgcgggcagcggttttatcgacccgtctggaggaggaatacgccgggagccacaatttatattcagccagcgtataaatcattacgcgtttatactagcataatcacagagtaaactgacgcgtccggtattccgcgacgttaccggcgattcggatagagtggtaatgagtaaaccatcccaacatgttttcgttaccgtcccccacccgctattgcgtctggtcagtttaggcctggtcgcgtttgtctttacgctcttttcgctcgtattatcgcgtgtcggcacccaactcgcgccgctgtggttccccacctccattatgatggtcgcgttttaccgccatgcgggccgtctgtggccagggatcgcggtcgcctgctcgctcggcagcatcggcgcctcactgactttatttcctgccgcctcgcttaactttagctggacggcaataaatattatcgaggcggccactggcgcgatactgctgcgaaaactgctccccagctacaaccccttacaaaatttgaatgactggtttcgtctggctatcggcagcgccgtgattccgccgctactcggcggcctattattttggctaatagcgccggaagcggtcgcctcgaaagcgtttctgatttgggtattatcggaagccatcggcgcgctgacgctggtgccgttaggtttactgtttaaaccacactatctgttgcgtcatcgcgacccgcatctgttgctggaaacgctattgacgctggtcattacgctggcgctaagctggctcgctatgcgctatattccgtggccgtttacgtgcgttatcgtcctgttgatgtggagtgcggtgcgcctgccgcgaatggaggcgtttttaatttttttagctaccgttatcgtggtctcgctcatgctggccaatgaccccacgctgctcgccacgccgaaaaccgacgtgatggtcaatatgccgtggctgccttttttaatgatcctgctgcctgccaatatgatgacgatggtgatgtacgcgtttcgcacggagcgtaaacatatcaccgagagcgaatcccgctttcgcaacgcgatggagtattccgccattggtatggcgctggtcggtacggagggtcagtggctacaggtcaataaatctctgagccattttcttggctatagccaggatgaattacgcacgatgacatttcagcaattgacctggccggaagacctgaataacgaccttgaacagctaaacatgctggtgcgcggcgacatcaacagctattccatggaaaaacgctactacacccgcaacggcgatgtcgtctgggcgctgctggccgtctcactggttcgtcataaagacaataaacctctctattttattgctcagattgaagacattaacgatctcaagcaaagcgagcaggaaaaccagcggttgatggagcgtattacacaggcgaacgaggcgctgtttcaggaaaaagaacggttgcacatcacgcttgactctatcggagaagcggtggtgtgtattgatgtcgcgatgaatatcacctttatgaacccgatcgccgagaagatgagcggctggcggcaagaggatgctttaggcacgccattattaacggttctgcgcattacgtcaggtgataaggggccgctgctggaggatatttatcgcgccgacaggtcgcgatcggacatggaacaggagatagtgctccattgtcataacggcggcagctacgatattcattacagtatcacgccgctcagtacgcttgatggcgataagattggttcggttctggttatccaggacgttaccgaatcacgaaaaatgttacgccagctcagctacagcgcaacgcatgacgccctcacccaacttgccaaccgcgccagttttgaaaaacagcttcaacagcgcctgcaaacaatacaggaatcgcctcaacatcatgcgctggtgtttatcgatctggaccgttttaaagcggttaacgacagcgcgggacatgccgccggcgatgccttattgcgtgagctcgcgtcactgatgctcagtatgcttcgatccggcgatctcctggcccgtctgggtggcgatgagtttggcctgttgctgccggattgtaatagtgacagcgcgcgctttatcgcgacgcggcttatcaacgccattaatgagtatcactttatgtgggaaggacgcctgcatcggatcggcgccagcgccgggatcacaatgataaatgaacataactgccagctcacagaggtcgtgtctcaggccgatattgcctgctacgccgcgaaaaatagcggtcgaggccgtctgaccgtgtacgaaccgcagcacgcattaacctcctcaaagggaatgatgccgctggaagaacagtggcatatgattaaaaataaccacctgctgatgcttgccagaaacgtcgcgccgccgcgtacgccggaggccaccagcttttggctggtctcactcaggctgtggaccagcgaaggggaagtgatggaagagcgcgcgttccgggcagggttagccgactccgcgctgcatcacgcgcttgaccgacgggtattccatgagtttttccaccatgcggcgaccgccgtcgccagcaagggattaagcgttgcgctgccgctgtccgccgcgggattatacagcgcgacccttattgatgagctgctggaacaactggagcatagtccactgccgccacggttattacacctgattatcccggctgacgttatcgttaagcaggcgcagaccgccgctgcgactctgcgaaaactgcggcaacgcggctgccaggtgattctcagccatgtcgggcgcgatttacagctgtttaatttactgcccctgcatatcgtcgattatttactgctggatagcgaccttatcgccaacgttcatgaaagtttaatggatgaaatgctgacctcgatcatccagggacacgcccagcatctggacatcaaaacgctcgccgggccggtacaaaacccacaggtgctggatacgctctcccgtattggcgtggatctgatttatggcgacactatcgccgaagcgcaaccgctggatttgttactgaataccagctatttcgctatccattgacggttgccagccgtgggtataccagatatgcagtagcgcgtaggaacgccacggtttccagcgctccgcgtagcgacggatctgcgcgggcgtcatcccggcgaagcgctgcttaattaagtaatcatcgggcaaaaagatatcttttgcctgccaaccgcgcagggcgaaatagttcgccgtccagcggccaattcccggaaacgtttgtaaatttttaacgctctgctcaatatccggcggcgcggcgagcgccagttttcccgccagcgtcgcctgcgccagatgaatcagcgcttcggcgcgccgcagcggcatccccagagctttaagcgccagcggatcggccaacgccagcgtttccggaccgggaaaacagacataatcgggcgcatccggcaacgcctcgccatagcggcgcgccactttcgccgtcaaccttgccgccatcgcgacactcaccagttgccccagtatcgcccgcacgccctgttcaaacgtatcaaccgatcccggtaaacgcagccccggtctgtcctcgcccagtggccccagcacggcggcaacctgcgcgggctggcagtcaagatcaaacagacgcgaaactttcgccagacacgccggcgcgacgggaagtaatccggcgctcacgctaacctgcacagtgtgggtgggcagatggggcctcacgctgaccagtccgcgatgctcgcccaccaccaggctgcgcgcataaaagccctcgcctactgtttccacgccgtccaccgcacgcgcggcaagaaagcccaacatccacgaccagtcgtaaggcggctgccagctcagggtaaacatacttttctcctttatttgacctttcagcataaacgctaatcgcacgtaacgccttgctttcatattccagttgtcgccgcgacgacatttcgctaaagtcacgccccttcttcactggcatggggattttaaggtgtttatcggatttgattacggtacggcaaactgctcggtcgccattatgcgcgacgggcatccacagttgctgacaatggagaataacagcgcattactgccgtctatgctgtgcgcgccgacgcgcgaagcggtgagcgagtggctgtatcgccatcatgatgtgccggcaacggacgaagaaacccaggcgctgctacgccgcgcgatacgctacaaccgcgaggaagatattgaggttggcgcgcaaagcgtacagtttggtctggcgtcgctggcgcactatattgacgatccccaggaggtctggtttgtcaaatcgccgaaatcctttttaggcgccagcggcctgaaaccgcagcaggtcgcgctgtttgaagatttagtctgcgccatgatggtacatattcgtcatacggcgcacagccaattgccggaggccattacccaggcagtgatcggtcgcccgatcaactttcagggactgggcggcgatgacgcgaaccgccaggcgcagggtattctggagcgggcggcaaaacgcgccggttttcaggaggtggtattccagtacgaaccggttgcggcgggcctggactacgaggctacgctgcgggaagagaagcgtgtgctggtcgtggatattggcggcggcaccaccgactgctccatgctgctgatggggccgcagtggcgtcagcgcgccgatcgtgaaaacagcctgttggggcacagcggttgccgcgtgggcggaaacgatctggatatcgcgctggcctttaaaaatctgatgcctttgctgggcatgggcggcgaaaccgaaaaaggtatcgccctgccggtgctgccgtggtggaacgccgtcgcgattaacgacgtcccggcgcaaagcgatttttacagtagcgcgaatggtcgtctgttgaacgatttggttcgcaacgcgcgtgaagcagacaaggtcgcgttgctgctcaaggtctggcgtcagcggcttagctaccgcctggtacgctgcgcggaagagagcaaaatcgccctttccggccaggcggatgttacggcgaggctgccatttatcagcgacgacctggcggtcgctatcagccagcaaggactggaagcggcgctggatcaaccgctgacgcgcattctggaacaggtgcaactggcgctggacagcgcgcaggaaaaaccggatgtcatctatctgaccggcggcagcgcccgttcgccattgattaaaaaagcgctttccgaacagttaccgggcatacccgtcgctggcggcgatgatttcggctccgtcaccgcaggactggcgcgctgggcggaggtcgttttccgctaagcgcctcgcaagcccagcgctgatggattgacattattcttgatgtggcttaacgtcaggagtgagggtaagggaggattcctcctccccctggtgtcttagtaagctggtaggctaatcactaagagtatcaccagtatgatgactaccttcatcataaccctttccttattttggccccttcctcgggaggggctttcccgtttcagcgtcctgctgaaatcggtggcttaccttcattgccgtgccgccactttaccgcactccggcgcgttaacgattttcaccgatgagagttgcgtagcgcctcgcaaagcgggtcgccattcagaataatcccgaccgtgttccataattcctccatttttctcccttccctgctgactacaatagaggaagcaacattccgcaaaacgtttcaggatgagaaacttataccgatgaaaggcagtaatactttccgctgggcaatagcgattggggttgtagtggccgccgccgcattctggttctggcatagccgtagcgaaagcccgaccgccgcgccaggcgtcgccgcgcaagcgccgcataccgcctccgcaggtcgccgcggtatgcgcgacggccctctggcgccggtacaggccgcgaccgcgaccacgcaggccgtaccgcgctatctgagcgggctgggtaccgtgaccgccgcgaataccgttacggtgcgtagccgcgtggatggtcaactcatcgccctgcactttcaggaaggtcagcaggtcaacgcaggcgatctgctggcgcaaatcgatcccagccagtttaaggtcgccctggcgcaggctcagggacagttggcgaaagataacgctacgctggcgaatgcgcgtcgtgatctggcgcgctatcagcaactggcaaaaaccaatctggtttcccgtcaggaactggatgcgcaacaggcgctggtcaacgaaacccagggaaccattaaagcggatgaagctaatgtcgccagcgcgcagttacagctcgactggagtcgtatcacggccccggtctcgggacgcgtgggtctgaaacaggtggatgtcggcaaccagatttccagcagcgataccgcaggtattgtcgtcattacgcaaacgcacccgattgatctcatttttactctgccggaaagcgatatcgcgaccgtagttcaggcacagaaagcggggaaagcgctggtcgtagaagcctgggatcggactaactcgcacaaattgagcgaaggtgtgttgctcagtctggacaaccagattgatcccacgacgggaacgatcaaaattaaagcgcgctttaccaatcaggacgatacgctgttccccaatcaatttgtgaacgcccggatgctggtcgataccgaacaaaatgccgttgtggtgcctgccgcggcggtgcaaatgggcaatgagggccactttgtgtgggtgctgaacgacgaaaataacgtcagcaagaagcgggtaaaaatcggtattcaggataaccgaaacgtggtgatcagcgcaggcttatcggcaggcgatcgcgtcgttaccgatggtattgatcggctgacggaaggcgcaaaagtcgaggtcgttgagccgcaaaccaccgtggcggatgaaaaatccccttcccgccatgaaggtcaaaaaggagcgcgcgcctgatgcaggtattacctccgggcagcacgggcggcccttcgcgtctgtttattctgcgccccgtggccaccactctgctgatggcggcgattttactcgccgggattatcggctatcgcttcctgcccgtcgccgctttgccggaggtcgactaccccactattcaggttgttacgctctaccctggcgccagcccggatgtcatgacctccgccgtcaccgcgccgcttgagcgccagttcggccagatgtcaggactgaagcagatgtcgtcgcaaagctccggcggcgcgtcagtggtaacgctacagtttcagttgacgctgccgctggacgttgccgagcaggaagtacaggcggcgattaacgcagccaccaatttattgccttccgacctgccgaatccgccgatttacagcaaagtcaatccggcggacccgccgattatgacgcttgccgtcacctcaaactcgatgccgatgacccaggtagaggacatggtagaaacccgcgtggcgcagaagatctcacaggtctccggcgtcgggctggtgacgcttgccggcgggcagcgccctgcggtacgcgtaaaactgaatgctcaggctgtcgccgcgctcggtctgaccagcgaaacggtccgtaccgcaattaccggcgccaacgtcaactcggcgaaaggcagtctggatggccccgaacgggcggtgacgctttctgctaacgatcagatgcagtctgccgacgaataccgcaggcttatcatcgcgtatcaaaacggcgcgccggtacggctgggcgatgtcgccaccgtcgaacagggggcggaaaatagctggctcggcgcatgggcgaatcaagcgccggctatcgtgatgaacgttcaacgccagcctggcgccaatatcattgcgacagcggacagcattcgccagatgctgccccagcttaccgaaagcctgccaaaatcggtgaaggtcacggtcctgtccgatcgcaccaccaatattcgcgcttccgtgcgcgatacccagtttgaactgatgctggcgatcgcgctggtcgtcatgattatctatctgtttttacgtaatattcccgccacaattattcccggcgtcgccgtaccgctgtcgcttatcggcacctttgcggtgatggtgtttttggatttttccattaataacctgacgctgatggcgctcactatcgccacgggtttcgtggtggacgatgcgattgtggtgatcgagaacatctcgcgctacatcgaaaaaggagaaaaaccgctggcggcggcgctcaaaggcgcgggtgaaatcggctttaccattatttccctcaccttttcactgattgcggtgctgatcccgttgctctttatgggcgatattgttggtcgactgttccgcgaatttgcggtgacgttggcggtagcgattttaatctccgccgtcgtctctttgacgctcacgcccatgatgtgcgcgcgtatgctcagccagcagtctctgcgtaaacaaaaccgcttttcccgcgcctgcgagcggatgtttgaccgcgtgatcgccagctacggacgtggattagcgaaagtgctcaaccatccgtggcttacattgagcgtggcattcgccacgctcctgctcagcgttatgctgtggatagtcattccgaaagggttctttccggtacaggataacggcattatccagggaacgctgcaggcgccgcaatcgtcatcgtatgccagtatggcgcaacgtcagcgccaggtggcggagcggatattacaggacccggcggtgcaaagcctgacgacttttgttggcgtagacggcgctaaccccacgctgaatagcgcgcgcctgcaaattaacctcaagccgctggatgcgcgtgatgaccgcgtgcagcaggtgatctcccggctgcaaaccgccgtggcgacgattcccggcgtggagctgtatctccagccgacgcaggatttaaccatcgacacgcaggtcagccgcacacagtatcagtttaccctgcaggccacgacgctcgatgcgctcagccactgggtgccaaaactgcagaacgcgctacagtcgttgccacagctctctgaggtaagcagcgactggcaagatcggggattagcggcctgggtgaatgtcgaccgcgacagcgccagccgtctgggtatcagcatggcggatgtggataacgcgctctacaacgcgttcggacaacgcctgatttcaacgatttatacccaggcgaaccagtaccgtgtcgtgctggaacataataccgccagcatgccgggcctggcggcgctggagacgattcgcctgacgagccgcgacggcggcaccgtaccgctcagcgcgattgcccgcattgagcagcgcttcgctccgctctccatcaatcatttagatcagttcccggttacgacattttcgtttaacgtgccggagagctattcgctcggcgatgcggtgcaggcgattctcgatacggaaaaaacgctcgccctgccagcggatattacaacgcagtttcagggtagtacgctcgccttccaggcggcgctaggcagcaccgtctggcttattgtcgccgccgtggtggcgatgtatatcgtgctcggcgtgctgtatgagagttttatccatccgattacgattctctcaacgctgcctacggcgggcgtcggcgcgctgctggcgctgatcatcgctggtagcgagctcgatattatcgccattatcggcattattttgctgatcggcatcgtgaagaaaaacgccatcatgatgattgacttcgccctcgccgccgaacgcgaacaggggatgagtccgcgcgacgctatcttccaggcctgtctgctgcgttttcgaccgattctgatgaccacgctggcggcgttgctcggggcattgccattaatgttgagtaccggcgttggcacggaattacgtcgcccgttggggatcgcgatggtaggcggcttactggtcagccaggtattaactctgtttaccacaccggtgatttatctcctgtttgaccgcctgtcgctgtacgtgaaaagtcgctttccgcgccataaagaggaggcgtagatgcgctttttcgcccttttcatctaccgcccggtcgccaccattttgattgccgccgccattacgctgtgcggcattctgggctttcgtctgctgccggtcgccccgctgccgcaggtcgatttcccggtgattatggttagcgcctcgctgccgggcgcctcgccggaaaccatggcttcgtcggtggcgacgccgttggaacgctctttgggacgcattgcaggcgtcaatgaaatgacctccagcagctcgctcggcagtacacgcattattctcgaatttaatttcgatcgtgatattaacggcgcggcgcgcgacgtgcaggccgccattaacgccgcgcaaagcttgttgccaggcggaatgcccagccgcccgacttatcgcaaggccaacccgtccgacgcgccgattatgattttaacgcttacctcggagagctggtcacagggcaaactgtatgatttcgcctctacccaactggcgcaaaccatcgcgcaaattgacggcgtcggcgatgttgacgtcggcggcagctccctgcccgcagtacgtgtaggcttaaacccgcaggcgctctttaaccagggcgtctcgctggatgaggtccgcgaagcgatcgacagcgccaacgtacgccgaccgcaaggcgcaattgaagatagcgtccaccgctggcaaatccagaccaacgacgaactgaaaaccgccgccgaatatcagccgctgattattcactataacaacggcgcggcggtacgcctgggcgacgtcgccagcgtcaccgactcggtgcaggatgtccgtaacgccgggatgacgaacgctaaacccgctattttgttgatgatccgcaagctgccggaggccaatattattcagacggtcgacggcatccgggcaaaactgccggaactgcgggcaatgatccccgccgctatcgatttacaaatcgcccaggatcgttcgccgacgattcgcgcatcgctgcaagaggtagaagagacactggctatctctgttgcgctggtgatcctggtggtgtttttattcctgcgctccgggcgcgccacgctaattcccgccgtcgccgttcccgtttcgctcatcggcaccttcgccgccatgtatctgtgcggcttcagcctcaacaatctgtcgctgatggcgctgactatcgcgaccggatttgtcgttgatgatgccattgtggtgctggaaaatatcgcccgccatctggaggcgggaatgaaacctttgcaggcggcattacagggtacgcgagaagttgggtttacggtcatctccatgagtctgtcgctggtggcggtatttctgccgctgctgttaatgggcggcctgccaggacgattattacgggaattcgccgttaccctctcggtggcgattggcatttcgctggtggtctcgctcacgctgacgccgatgatgtgcggctggatgcttaaatcaagcaaaccgcgcacccaaccgcgtaaacggggcgttggccgtctgctggtcgccttgcaacagggttacggcacgtcattaaaatgggtgcttaaccatacgcgtcttgtcggtgtggtttttcttggcaccgttgcgctgaacatctggctttatatcgccatccctaaaacattctttccggagcaggacaccggcgtgttgatgggcggtattcaggctgaccaaagcatctctttccaggccatgcgcggcaagctgcaggattttatgaaaattattcgcgacgatccggcggtgaataatgtcactggttttaccggcggatcgagggtgaatagcggcatgatgtttattacgctgaagccgcgcggcgaacgcaaagagacggcgcagcaaatcattgatcgactgcgggtcaaactggcaaaagaacctggcgccaggctgtttctgatggcggtacaggatattcgcgtcggcgggcggcaggctaacgccagttaccaatatacgttgctgtctgactctctggcggcgctgcgcgaatgggagccgaaaatacgcaaagcgctctcggccctgccgcaactggcggacgtaaactccgaccagcaggataacggcgcggagatgaaccttatctacgaccgcgacaccatgtcacggctgggtattgatgttcaggccgcaaacagtctgttaaataatgctttcggccagcggcaaatttccaccatttatcagccgatgaaccagtataaagtggtgatggaagtcgatccgcgctatagccaggatatcagcgcgctggagaaaatgttcgttatcaaccgtgacggaaaagcgattcccctctcttatttcgcccaatggcggcccgccaatgcgccgctgtcggtgaaccatcagggactttccgcggcgtccacgattgcctttaacctgccgaccggcacatcgttatcgcaggcgacagaggccattaatcgcaccatgacgcagcttggcgtcccctcgacggtacgcggcagtttttccggaacggcgcaagtcttccagcagaccatgaattcacagcttattttgatagtggcggcgatcgctaccgtctacattgtgctggggatactgtacgaaagctacgtccatccactgaccattctctctactctgccatcggcgggcgttggggcgcttctggcgctggaactcttcaatgcccctttcagcctaatcgccctgatagggatcatgctattaattggcattgtgaagaaaaacgccattatgatggtcgattttgcgcttgaagcgcaacgaagcggcggcctgacgccggaacaagccattttccaggcctgcttgttacgcttccgtccaataatgatgaccacgctggcggcgctgttcggcgcactgccattggtgttatctggcggagacggttcggaattacggcagccgctggggataaccattgtcggcggtttggtcatgagccagctcctgacgctctataccacgccggtggtgtacctctttttcgatcgtctgcggctacgtttttcgcgtaaaaatagcaaaccggtagtagagatatgacagaacttcctgacaacacccgctggcaactctggattgtggcattcggcttttttatgcagtcgctggataccaccatcgtcaacactgcgctgccctccatggcgaaaagcctgggggaaagcccgctgcatatgcacatggtagtggtgtcatatgttcttaccgtcgccgtaatgctccccgccagcggctggctggcagataaaatcggcgtgcgtaatatcttctttgccgccattgtgctgttcacgctgggttcgctgttttgcgccctctccggcacgcttaatcaactggtattagcgcgggttttacaaggcgtaggcggcgcgatgatggtgccggtcggacgcctgacggtcatgaaaatcgtgccgcgcgcgcaatatatggcggcgatgaccttcgtcaccctaccgggacagatcgggccgttactcggccccgcgctgggcggggtgctggtggaatatgcttcatggcactggatctttctgatcaatatcccggtgggaattgtcggcgctatggcgacctttatgctgatgccaaactacatcatagagacccggcgctttgatctgccggggttcctgctgttagctatcggcatggcggtactcacgctggcgctggacggtagtaaaagcatggggatttcgccctggacattagccggacttgctgcgggtggcgcggcagccattctgctctatctcttccatgccaaaaaaaactcaggcgcgttattcagcctgcgattgttccgcacgcccacgttttcactagggttgctgggcagttttgccgggcgtatcggcagcggtatgctgccgtttatgacgccggtctttttgcaaattggtcttggtttttcaccgtttcatgccggtttgatgatgatccccatggtgctgggcagcatgggaatgaagcggattgtggtgcagatagttaaccgttttggctatcgtcgggttctggtagcgaccacgctcggactggcattggttagcctgttgtttatgtcggtcgcgctgctcggctggtattatctcctgccgctggtactgcttttgcagggaatggtgaactcggcgcgcttttcttccatgaacaccttaacgctaaaagaccttcccgatacgctggccagcagcggcaatagcttattatcgatgattatgcagctctcgatgagtatcggcgtcactattgccgggatgctgctgggtatgtttggccaacagcatatcgggatagacagtagcgccacacatcacgtctttatgtacacctggttatgtatggcggttattatcgcgctaccggcgataatttttgcccgcgtgccgaacgatacacagcaaaacatggtcatttcacggcgtaaaaggagcctgtaatgaaagtctggcggcccggaatcaccggcaagctgtttctggcgatcttcgccacctgcatcgtgctgctgatcagtatgcattgggccgtgcgcgtcagttttgaacgcggatttattgactatatcaaacacggcaacgagcagcggctacaaatgctgggcgatgcgctgggcgaccagtaccagcaacacggcaactggcgttttttacgcaacaacgatcgcttcgttttccagattttgcgttcatttgagcatgacaacgaccgcgataaacccggccccggtatgccgccgcacggttggcgcacccaattctgggtcgtcgatcaaaatggccgggtactggtcggcccacgcggtccggtgccgcatgacggtactcgccgtcccattctggtcaatgacgtcgaagtcggcgcgattatcgcctctcctgtcgagcggctgacgcgcaatacggatattaattttgatatgcagcagcggcgcgccagttggatgatcgtggcgttatcaacgttgctggccgcgctggcgacatttttgctggcgcgtggcctgctcgccccggtcaaacggttggtcgaaggtacgcacagactggcggcgggggattttaccacgcgcgtgactccaaccagcgctgatgagctgggaaaactggcgcaggactttaaccagcttgccagcacgctggaaaaaaaccagcagatgcgccgcgactttatggcggatatttcccacgaactgcgcacgccgctggcggtattgcgcggcgaacttgaagccattcaggatggcgttcgccagttcacgccagaatcggttacctcgctacaggcggaagtcggtacgcttaccaaactggttgacgacctgcatcagctgtcgttgtctgacgagggcgcgctggcttaccaaaaaacgaccgtcgatcttgttcccctgttggaagtcgctggcggcgcgttcagagagcgctttaccagccgggggctaacgctacattacgcgttgccggatagtatgaccgtcttcggcgacccggatcgcctgatgcaactgtttaataatctactggaaaacagtctgcgctacaccgacagcggcggcggcctgcatatttccgccgaacaacgcgacaaatcattattcctgacctttgccgattctgcaccgggcgtcagcgatgaacagttacaaaagctttttgaccgtttttaccgcacggaagtgtcccgtaaccgcgccagcggcggttctggactggggctggcaatatgcgtcaatattgtacacgcgcataacggtcatcttcacgccgctcattcgccttttggcggggttagcattacagtagagttaccgctggatcgcgatttacagagagaagtatgactgaattacccattgatgaaaacacgccgcgcattttgattgttgaagatgaacccaagctgggacagctgcttattgactacttacgcgcggcgagttacgcccccacgctcatcaatcatggcgacaaggtactgccgtatgtgcgtcaaacgccgccggatctgatcctgctggatctgatgctgccgggtaccgatggtctgacgctatgccgggagattcgccgtttttccgacatccccattgtgatggtcacggccaaaatcgaagagatcgaccggctgcttgggctggaaatcggcgccgatgattatatctgtaagccttacagcccgcgcgaagtcgtggcccgcgtgaaaaccattttgcgccgctgtaaaccgcagcgcgaactccagcagcaggatgccgaaagcccgttaatgattgatgaaagccgctttcaggcctcctggtgtggtaaagcgctggatttaacccccgctgaattccgtctgctaaaaaccttatcgcttgaaccgggtaaagttttttcccgcgagcagttgttaaaccacctctacgacgactaccgtgtggtgaccgaccgtaccatcgacagccatattaaaaacctgcgccgtaaactggaatcgctggatgccgaacagtcatttatacgcgcggtctacggggtgggatatcgctgggaagcggatgcgtgtcgcctggtataatgattattggcataacaataacaaggtcgtaagacgatattttccgccaacgctattctggcggaattaacacactgccctctttcctttggccgagcggtatcccgaaaaccacgacgaacgcgatcggggacaataaattatttggccgctctttttagtttaccgatatactgtgagtagttttttaaacttattgcgcattaattcattaagtgaatctaaaaatacataaacataataccagcttaattatacatggatttttatgacagaaacgtcatctcaccgctataaaccacgcaatataataaatgcgccaaatgtaaaatcgtctattttttcccggagccaacaacgcggcgacagcgaaattatccagcgctggttaagcaaccatttttatcgttggatcattggtgactttcctcatgtttatcctgtgcgctccgtcgccgattatgccgtttattttagcgctgatgcagaaatccccgcctggctggcgccaaagctgggtggcgatgagcgcttttactaccttaacgttcagcacccgcaacttgtggcgatggaaagagatttagtggaatttctttcgcgtcaggaaggaacgcggctggaaactaaactacagcgtatcaactgctttaccgtgctggcaatgcgcgaagcggagcatcaaaaaatgcagcgcctgcgtgaacaaggttggtatccctccaacagcgaggcgctaaaaccggtgatgacggtgaataacggcgtactggttgagcttgatgcaacaaaccccggcctgcgcagtgagatggcgtatgaatcctggcatatgcaacactgcgtcggagattttgataataaaggcgcgctttccggcggctacggcgattactacgcccggcaaattgaacaacagaaacttcgcctgttcagcctgcgcgacggcaataatattccccacgttacaataagcctggtggttggtaataacggcctgagcattgatcagattaaaggtaagcaaaatcgccatcctattaagaaatatgctaacgatgttttatctctgttacgccatctgcaaccacttcctgagcgccacgctgattgcgaagggatgggaatagtttatgaattgacgccggaatattcaggttggaaatttattacgcatattcatgacctcaattttctgctcaatgtgctgcatgacaattttcacttaatggaacacttccccactcccccggtagctttacagtggctgctgctgcacagcgccccggaggcgctgcgctaccttcaggttgttgatcctaacgtggcgacggctgcggaaatgctgtttccgcagcatgaatggcatcctacgcttgccgggaaaaacaccagtagcgaacctttcgaaattgaaagcctgacgctacaaaccacgcgctacctccctgtcatcaaggaggtgcaataatgttctggattgttcttattattgccgccctattttttagctggcgcaactacaaaaaaaacaaaccgctgattgcagcccgtatcgccgaggagaaagaaaaagatcgcctgaaagacctgcgtcgcgatacccgacggcggcaatgggcgctggcgctagctgatatcctcgcccggcgcaacgggctaccgatcaaaggcgttgagctggtatttaaacttgacgatgacaaacgccgctatctggcgcagcaggtaaaaaaagagctgggcttgagcgaaaacctcgacggcgcggcgttacgccacaaggtcgaggatatcttacgccgctggcctgcgggcatcggcagctcgccgcgcacgttttatcatcatctggcggcccagggccaggtccgcgacgcgctggctttcgactgcatgcgcaccgcctttctgacccgctgtatcgccgggctcggctggtgcgacgtacatcaggcctggctggtgttattacttaacgcccagcgcgctcaggactgttttgattcctgggaggattacgccaccgcctacgttcgcgcccgccgggtatggctcacgctacgtgacacgccaacagcgcttgccggacgggatttacaggaagccacccattatctgcaagaccctgtcagccgctggcgacaactgccgtggaatgaattcaaaattttcgagccgatttaaaggacgctttatggaacaggatgatcgtctgctcaacgctatgtttgagatgtgcaaccacaaaaatcccctcaatgacgggcaacgagagtggcatatcgccgatattcccggcctgctgcgcgaagaacgctatgacgaactggacgaacgctacaaccaggcgctgacggagagctttaccagccgcgaagcggaaaagcgctatttcttcgcctggaatcaaatggacaaccctttttacgatatggacacgctggttgaggctgggccgcaaggattagcgctgatcaaaaactggcagcgcgcccgtcctcgctccactcacgcctggcttgccgaggcgcaatactggaatcaccgtgcgtggctttaccgcagctatggctgggcgagagaaaccacccgagcgatgtggatctgcgccgccgcctgcaacgaacggatggtcatcgccgcgctcaatgccatcgactgtgaaccgcgccagtggatggcggcggccctgaccagcaccaactcaaaagtcttcggccagcccgagtggctggttgagttcctcgtgggcgcggatgttgccgggcagccattaatggaagatctggctgaatatcatcgccattcaccgcaggaggtggacgcgctgatggcccattccgggttgtcgtttaccgacgcggtttgcccaaatttgccgcgcccgtccgtgctgccggagtgcaatgacgatgccgggcaaaaatactggctcgccgtctgcctggctattttcccgacggcattttacgtgctggatgaatatatcccgtttcgtatgccacgctggagagggtctcacgaggaaatccgcgaatttctggaatcaagcgtatgcgatcacctttctgccgcagaacgtgaacatctggagctattgatctggtgggacgatcaccgcgatctgcgcatcaaagaggttgactccccggcagaacaggaacgtattatcgccaaagccgaagagattagcctgcgagcgcatatccaggaatctcgccacaacgcgctggagtggctgcgggtctgctatagcgatctggacgataatgacgcgctctggcgaacccttcagcgttcgatcgtggaaaaagttaagctcaacaattacttctctgatgacacgataaagttcgccctgcgcgattttcctgacacctggtggatgtataattttctctgtcagaatgcgcagcaaacggaattcgcagtgccgaaaatccgtcgtggctactttcagtacgccgggttattgggtttcgaaaaggatgaggcgcaaggcctcgcctggctcgatagcgtcgccgacattcaatataaccataactggcgggcggcgattaaaaatttcgactggttcgggctcccggaacatttcgtgccgctggcagagctgggcgcacaaagaaatatacccgccgcgctaaacttgctgggccttgaacacaataataaagagaacaacggcctactaccttacgatcctgccatcgcgttagggtattttcagcgcgcggcggagattttgcaccggcagttagcgctgcgcgagagcaccccgtacaaattaatagataacggaggctataccgactatgaaaatgacctgcaaaatattcatttcagcattggcatctgcaaccagcgtctgagtaaacaagaacctgataccgaaaaacgttccgcttatgaaaaagaactactcgataatctctggctggcgcatcagttcgggcataaagaggcctggggcttgttcctgctgaatatttttgaagtgaaggatattacgctggcgcataagcatctggaactggtgcaacaagaggccaacaaaggcacgctacatgctatggtgaccctatcgcgcctgcacggtaataaacacgatcgaacgctgtttaatatgaagctaagcgcacgctgggcgcattttgccttcacactttacccggataatgaaatcgttatggactgcctggaccacctgcatttcgattctttctggaaacgctttcgtttcgcctggtataccgtccgtatcccgaattcagagctgccgggacaggtcaactcaatggtgtaaggtggtttactcccctctcccacggcgctacaatgcccgcccttaaagtgaggactctcctcaagccgcctcatcaggtgaggcggatctgacctgtcatcagaacgagaaaatgatgtttaaaccagaactcctttcgccggcgggaacgctgaaaaatatgcgttacgctttcgcttacggtgccgatgccgtctatgcgggccaaccacgctactctttacgcgtgcgtaataacgaattcaatcacgaaaatttgcagcttggcatcaacgaagcccacgcgctcggaaaaaaattctacgtggtggtgaacatcgccccgcataacgccaagctcaaaacctttatccgtgacctgaaacccgtcgtcgagatgggcccggatgcgctgatcatgtccgatccagggttgattatgctggtacgcgagcacttcccggcaatgccgattcacctgtcggtacaggctaatgccgtaaactgggcgacggtaaaattctggcagcagatgggactgacccgcgtgattctctcccgcgagctgtcgctggaagagattgaggaaattcgccagcaggtgccggatatggaaatagaaattttcgtccacggcgcgctatgcatggcctattccggccgctgcctgctttccggctacatcaataaacgcgatccgaatcagggcacctgcaccaatgcctgccgttgggaatataacgtgcaggaaggaaaagaagacgttgtcggcaacatcgtgcataagcatgaaccgattccggtacagaacgttgagccgacgctcggtatcggcgcgccgacggataaagtgtttatgatagaagaggcccaaagaccgggcgaatacatgaccgcgttcgaagacgagcatggcacctatatcatgaactcaaaagatttgcgcgctatcgcccacgtggagcgcctgacgaaaatgggcgtccactcgctgaaaatcgaaggccgcaccaaatccttttattactgcgcccgtaccgcccaggtctaccgtaaggccatcgacgacgccgccgcgggtaaacccttcgaccctacgctgctggaaacgctggaaggtctggctcatcgcggctataccgaaggtttcctgcgtcgccatacgcacgacgattaccagaattacgagtacgggtactccgtttccgaacgccagcaatttgtcggcgagttcaccggtgagcgtaaaggccaactggcggccgtggcggtgaaaaataaattctccgttggcgatagtctggagctgatgacaccgcagggaaatatcaatttcaccctggaacagatggagaacgccaaaggcgacgctatgccggtggcacctggcgatggctataccgtctggatgcccgtcccgcaggacgttacgctggattacgcactattgatgcgtaatttctcaggcgaatcaacgcgtaacccccatgctaagtagttaattgcggttattttttcatggcgggaagattcttagaaattgatcacataccgcttcgctcaatgcgggtattattcaacgcgctgaaaaacataacccataaatgctagctgtaccaggaaccacctccttggcctgcgtaatctcccttacgcaggcttattttttgcgtataatccataaaaaagtggtacttcccgccatatccaaaattgaccacactaaccaaagcgcaaatgggcgcttaggtttagagacctcccctatccattgccagccagcaagtcacaatcctccccgcatccggtcggactcaggacttagcattgtgacgttaacgtttaaaatcagtgaattaaatcaataactactttgtgagcacttacacaaaaagtttccaggttattaaattaaggttaaaaactgataatttaagcgtgtaaaaatatggcacgttttaatgccgcttttacaaggattaaaataatgttttcccggattagaggtttgatttcatgtcaaagtaatactcaaaccatcgcacctacgctcagtccaccttcatcaggccatgtaagttttgctgggattgattatcctctattgccactaaatcaccaaacgccgctcgtttttcagtggtttgaacgcaatccagatagatttggtcaaaacgaaattcccattatcaatacgcagaaaaacccttatcttaataatattatcaatgctgctataatagaaaaagaaagaattatcggtattttcgttgatggcgattttagcaagggacaaagaaaagcattgggaaaattggaacaaaattatagaaacataaaggttatttacaattctgaccttaattatagcatgtatgataaaaagttaacgacgatttatttagaaaacatcaccaaactggaagctcagtcagcaagtgaacgagatgaggtcttgcttaacggggtaaaaaaaagcctggaagatgtcttgaaaaacaatccggaggaaacgcttatttcatctcataataaagacaaaggtcacttatggtttgacttctacagaaatcttttcctgctaaaaggaagcgatgcctttctggaagctggtaaacctggttgtcatcatctgcaaccaggcggtgggtgcatatatcttgatgcagatatgttacttactgataaactcggtactttgtatttacctgatggtatcgctatccatgtaagtcgtaaagataatcatgttagccttgaaaatgggattattgctgttaaccgcagcgagcatccagcattaataaaaggactcgaaattatgcacagtaaaccttatggcgatccctataatgactggctcagtaaagggttgaggcattattttgacggttctcatatacaagattatgacgcattttgcgatttcattgaatttaaacacgaaaatatcattatgaacacaagcagtttaactgccagttcttggaggtaatcatgatagccttgttttactcacccttcccaccgtcacgtataatcggtatccagagttattcctttatcctgtaaaatgtgatacagattctccattgatctaataactacctcaatttcacattcaagtttctctacagaactttcattgagtgagaagttgagagccagtaataatgattgtgagttattatcataacacaaatgtggtccattattctctgcaaaccataaattagcattgagaaattcaaaagcaagattattattatccggaggttttccgcaaaaaccgtatatcattatatactcactgttagtgcttgttagtaagatacggtaacggttatctataataaatgagcataatctgttttcgtcaaagacaattgaatcggtatttaattttagtgaaaactgtcttaataagcgatcggctcttgaatacataacaccccatactctatctaaagcgtttctatataagtcataagcctctggtctggacgattaacacctcgtgtcatcgtcggaattcgtcttttccctatgacttgctgtgtttgctcatttatggccaggctggccgggttctgatgccatttgcgctaaggtatagtccggcgcatattcccatcataccaattccccccatgccaaacgatgcgcctaaaaccgtcagagcggtagtatatgccgcaccactactgacactggcgacagcccctgagcataccccactgaaaacacttgtaaacaatgccgtggttcccaggcacattaaacatctgggtttattgccgtaagcgttaaaatcaacgatttcagctaccggtttttcgtcattaccccgttcagaaggagggagcaatggcgtttgcgcattcacgcctgaagtgacattcatataaacctcttcatgcacatgcctgtttatgtttatgagaaaagcgatacatcaggcaacggtacgactataggacaccgcgctaagccatcatctaaataggttttatttgatatatagtagcgtgcttctaatagtgcgccgtgtttctgctaaagagtctaaagaacatttcgattttatgctattaaaaagtatgtttggtaataaatatcaggtttttatctgatattatggtgtttgaaattaatactgataactgacgtatgttcgtcttgttaattctccgtttcgttatcaaaggcgctatatcggaaagcgtctgactaccccttgtgatttccttgcactctcacaagcgctactcaatgcgcataccggcatctctcttgtcgccatttgccttaaaccatgcttcgcttaccgctgcgtacagcaggaagaaaaacggtaaagcaataagtgcgcaacatttcaattttcatcctgttctgacctcgctttttcatttctgctatacactttctggagattgttgttcaacctattaaggcataacggatggctaactttcccgccagcttactgatcctcaatggcaaaagcgctgataaccagccgctacgtgaggccattactctacttcgcgacgaaggcatacagattcacgttcgggtaacctgggaaaaaggcgacgcgcagcgttacgttgatgaagcccgtagactgggcgttgaaacggtgattgccggcggcggagacggtaccattaatgaagtgtcgaccgcgctcatccagatccgcgacggcgtagcccctgcactgggccttttgccgctcggcaccgccaacgattttgccaccagcgccggtattcctgaagcgctggacaaagcgctgaaactggcgattgccggaaacgcgatggaaattgatatggccatggtcaatgataaaacctgttttatcaatatggcgacgggcggttttggcacccgcattaccaccgaaacgccggaaaaacttaaagccgcattgggcggcgtctcctatcttatccacggtctgatgagaatggatacgctgacccctgatcgctgcgaaatacgtggcgaaaactttcactggcagggcgatgcgctggtgatcggcattggcaatggtcgtcaggctggcggcgggcagcaattatgtcccaccgcgctgattaacgacggactgttacagctacggatttttaccggcgaagagctgttgccggcgctgttttccacgctcacgcagtcagatgacaatccgaatattattgacggcgcctcagcgtggtttgatattcatgcaccgcatgaaatcacgtttaatctggatggcgaaccactcagcgggcaagaatttcatattgaggtgctgcctggcgcattacgctgtcggctgccgccggactgcccgttgctacgttaataacacctgtcgctggccggatgcgctcacatccggcttttcttcgttgaactcaggcgatggtgactttgctatccagatagacatcttgtacggcgttaatcaacttcacgccatcagccatcgatttcttaaaggctttacgtcccagaattagccccattccaccggctcgtttgttgatcaccgcggtacgaaccgcgtcgccgaggtcagtgtcgccgccgtccgcgccgccggagttgataagcccggcgcgtcccatatagcagttcgccaactggtaacgtaccaaatcgatcgggttatcgctggtcagtttgctgtacacgcggtcatcggtatagccgaagttgactgctttataaccgccattattctcggccattttctgtttcacaatatccgcgccaatcgtagcggccagatggttggcttgccccgtcaggtcagcggatacatggtaatcaacgccgtcttttttaaaggaagaattacgcaggtaagcccacaatacggtcaccatacccagctcatgcgcacgctcaaaagctgcggagatctcttcaatctggcgacgagactgttccgaaccgaaatagatcgtcgcgcctaccgccacggcacccatattgaacgcctgctcaacgctggcgtacagggtctgatcgtactctgtcggatagctcaatgtttcgttgtgattcagtttgaccaaaaacggaatacggtgcgcatagcgccgtgaaaccgaggccagtacgccgtaggtagaggccacgcagttacagccggcctcaatcgccaattcaacaatgttttttgggtcaaagtagcgcgggttagccgcaaaagaggcgccggcggagtgctccaccccctgatcgacgggcagtatcgaaaggtatcctgttcccgccaggcgtccagtattatagagcgtctgcatattacgcagaacggctggtggacgattattgtcaatcatcacccggtcaacataatccttgccgggtagataaagctgatcggaaggaatggtcatacaacgatgctgtaaaaggctgtcggcgtctttgccaagcaactgcgcaatatcagtcatagctatgctcccgtaagttccgatagggtatcggaaggtgaatagtcctgccccgcagattgcgggtcgcaataagcctggtactgaccgaccatttttgccaactttagcgcattttttcggcgctatctgctgactcgattcacgtccgaaaaagtgttagatcggtcaaaattaatgctcaatggtatttaaaaggtattattaaatggtattgtcatggcgtaccttacctgtcatgaaggattcaaaaatgaaaacgacctttaaactgtcgttcatgatgttcgtggagtggtttatctggggcgcctggttcgtccccctgtggctatggctaaataaaagcgggttttccgccggtgaaataggctggtcttatgcctgtaccgccattgcggcgatcctgtcgccgattctggtcggctccgttaccgaccgttttttctcagcgcaaaaagtcctggcggtactgatgtttgcaggcgccgtgctgatgtatttcgcggcgcagcaaaccaccttcgccggattctttccgctgcttctggcctattcattgacctatatgccgaccatcgcgctgacaaacagcattgccttcgctaacgtaccggacgttgaacgcgattttccacgcattcgcgttatgggaaccattgggtggattgcctccggcctcgcctgtggattcctgccgcaaatgttaggctataacgatatttcccccaccaacattccactgctcataaccgccgcaagttcagcgttgctgggcgtatttgcgttctgtctgccagacacgccgccaaaaagcaccggcaagatggatattaaagtgatgctggggctggatgcgctggtcctgctgcgcgataaaaactttctcgttttcttcttctgttcctttctgtttgcgatgccgctggccttctactacatcttcgctaacggctatctgacagaagtaggaatgaagaacgccaccggctggatgacgctcggccagttctctgaaatcttctttatgctggcgctgccctttttcactaagcgctttggtattaaaaaggtattattgcttggtcttattaccgccgcgatccgctacggcttttttgtctatggcggcgcggagacgtacttcacttacgccctgctgttcctcggtattttgctgcacggcgtaagttacgatttctactacgtcaccgcctacatttatgtcgataaaaaagcgccggttcatatgcgtaccgctgcgcaagggcttatcaccctctgctgtcagggattcggcagcctgctgggctatcgtctcggcggcgtgatgatggaaaaaatgtttgcttatccgcaaccggttaacggtctgacattcaactgggcgggcatgtggacgtttggcgcagtgatgattgccgtcatcgcgctactgtttatgattttctttcgcgaatcggacaaagagatcactgctattgacgatcgcgatattgcgttgacacaaggggaagtaaaatgaaagcagaacgtattctcggtgctctttacgggcaagcgttaggggatgcgatgggaatgccctctgagctgtggccgagaacgcgcgtcaaagcgcatttcggctggattgaccgctttctgcccgggccaaaagaaaataatgccgcctgctattttaaccgcgcggagtttacggatgataccgcaatggcgctctgcctggccgacgcgctactcgaatgcgaaggcaacattgatcccgagattattgggcgtaacatcctcgcctgggcggaacgctttgatgcgttcaataaaaatgtactcggcccgacgtcaaaaatagcgctgaatgcgattcgcgacggcaaacccatcgcggcgctggaaaataacggcgtgactaacggcgcggccatgcgcgtttcgccgttgggctgcctgttgccgccaactaacctgacagcctttatagcagaagtggcgttagcctccagcccgacgcataaatccgatctggcggtggctggcgccgtggttgtcgcctgggccgtctcacgagcggttaacggcgacacgtggcaaagtattgccgactcgctccccgccgtcgcccatcaggcgcagacagcgcgtattaccacgtttagcgcctcgctatcggcacgtctggaactggcgctaaacattgtccgccatgccgacggcgtcgaatctgccagcgaacagctctatcagatcatcggcgcgggaaccagcaccattgaatcggttccctgcgctatcgccatggtggaactggcgaataccgatcctaaccgctgtgccgtgctgtgcgctaacctcggcggcgataccgacactatcggcgcgatggccaccgccatttgcggcgcgttgcacggggtaagcgccattaacccccagttaaagcaaacgctggacgaggttaatcagctggattttgcgcgctatgccgttgcgctggcgagttatcgtcaacggcgggaggcactatgaacggcgcacggttgctgacattattaccgaccctgcatacccggcgtccgctcaccgttatcggcgcggcagtgatcgatatcattgccgacgcctggacgttgccgcgtcgcggaggcgatattgaactgcaacaacagagcgtcaatgtcggcggctgtgcgctgaatattgccgtggcgttgaaacgactggggattgacgccagcaatgcgctgccgctgggccagggcgtgtgggcggagaggattcgccgccgtctggcaaaagagggattatccagcgtgattgacgcggttgaaggagataacggctggtgtctggcgttagtcgaaccggatggcgaacgcacgtttatgtcttttagcggcgtggaaaaccagtggaatgcagactggttgtcgcagctcaggacaccgcggggcagtcttgtctacctgtccggctatcaactggcctcgtcctgtggcgaaccactgatccagtggctggaaaccgtcgacgatgtcacgccttttatcgattttggcccacgaatcggtgatattacagacgatgcaatggcgcgcattatggcctgccggcccatcgtctccctcaatcgccaggaagccatcatcgccgcggaacgcgccggacttgcgaccgatacgcgcactttcggcgaagcatgggtaaaccgcttttccgcgccgctggtggtgcgccacgataaagacggagcgtggtattttagcgcgcaatcttccggcgttgtgccagcgtttccggcaaccgtggtggataccatcggcgcgggcgacagccatgctggcggcgtgctggcaggactggcgtcaggctggtcgctcgcggatgccgtactgctgggaaatgcggtggcgagctgggtggtcgggcatcgcggcggcgactgcgcgcccacgcgcgaggcgctactcctcgcacacaaaaacgtataggtcgctacgacaataactgatgctgtattcaataggccgctgctgctgatcgagcgccacctgcttaatcaccagcaccggcactttaccatccatttgaatatgcgactgaaactcatcatccggcatccgggcgctgacgcgggatcgggtacgctgagggtaaatgtgctggcgacgaaaatagtcatacagagaaataccaatcgcgtcgacatcatgaatcagatgcgcgggcacccaggactcttcaatcgataccgcgtcctcatcaacataacgaatgcgtttgagtaaaaagacgtcgctgcctgcggggatcgccaggtgctgcgcgacctcatccggacaacttaccacgcgtttgttaacccatagcgtatccggttttttgccgcgcaagacaacctgctgagaaaatccccgcgcctctttcagggaatattcaaagatattattgatttgcgtaccgtagccgcgggcgcgcgtgacaacaccctcttcttccagcgcctgcatcgcttttcgtaccgtgatgcgcgagacgccggtaagctggctgagatcgcgttcgccaggcaaaatattaccgtgctcaagaataccgctgcgcacggcatcctttaccgtctgggcgaatttcatgtatagcggcgtattatccgccgctgaaattcgttcattcagttgcgcgatgagccgggtatgcgcttgttccatttatctttcctgacgacgggtctgtaggcagtatactaccaccacgcgtggaaatgatgtaccggaccaatgcccttccccacttccagcgtgtccgcctgcgccagcgccgccgaaagccatgccttcgcctcgtttaccgtctctccccaactgcgatgccggggccgtaacgccgccagcgccgccgacagcgtacagcccgtcccatgcgtatttttggtgttcacacgcggcgcgctaaaacgctgctcgccctcgcgggtaaagagccagtccgggctttgcgcatcctctaaatgcccgcctttcatcaataccgcttcacaccccatcgccagtaacgcccgcccctgcgccagcatctcctgttccgtacgcgcatggggcgcatccagcaacgctgcggcttccggcaaattaggcgtaatcagcgatacctgcggcaacagccggacgcgtaatgtttctatcgcagagggcgagagcagcggatcgccgcttttcgccagcatcaccgtatccagcaccacattacgtacatgatggcgctgtaaccgttccgccacggcctcgacaatatcggtttccgccagcatcccgattttcgtggtatcaatgcgcacatcgctgaacacggaatcaagttgagcggcaacaaagtccggctctatccggtacaccgactgtacgccacaggtattttgcgccaccagcgcagtgatgaccgaacagccatatgcgcccagcgcggaaaaggtcttgagatccgcctggataccggccccgccgctgggatcggtgccggcaatcgtcagcgcgttaattcgttgcattggccgcctccacatccagatgatagagcgcatcaagaaaagccgggatgaagctacccggtccttcgctacgctctgccgcggcctgtccagccagtttcatccagcagcaggccgacgcgacattgtccagcgcggcgcccggtaacgcgcaactggcggcgacgaccgccgacaacgcgcagccggtgcctacaatgcgagtcattaacggatcgccgccgggaatgctcagcgtgcgctgaccattagtgacgtaatctatctctccggtaaccacaacgatgcagtctatctgacgcgccagcgcctgcgccgcaggcagtgcggccaacgccgcctcggtggtatctacgccacgtccgcccagcgccatgccggataacgccaggatttccgaggcgttgccgcgtattgccgccgggcgcagggacaagagatccaggcaaaatcgccgacgaaattccagcgcgcccaccgcgacaggatcaagcgtccacggcgttttggcatcataagcgctttctaccgccgcacgcatcgcgtcagcgcgtgaggcagttaatgttccgacattaatcagcaaggcgttggcgatggcggcaaacggtctggcctcgacaggatcaatcaccatggcgggtgaagcgcccagcgccagcaacgtattggcggtaaacgtttgtacgacgtcattcgtcatacagtgcgtaagcggggagagcgcgcgaaagtgttttaacgtatgcgccgcaagcgtgcggcagtgcaggtcaggctgcatggttcagctcctgcccgcgtgaagaagggacacgagcagtgtcagacttccctacgctggcattatccagatcaggtggtacgggtatttctcagccttcacaaagaagggcaccccgagtcgtcaagccccaccgtgttaagcggggtttcgctattaagcatactgtctgtgccagacaatgtaaatttacagtcagcggcggacgataatttcagcgttatcagatagttctcaaaacctattcggttctggcaaacttgctggcggatatgttgctgcacgacgctttcgtttacactttttacgaaaaggggcgtgagataacaaaatagcgcttgtcagatacgccaccagcagaaatgatacacacgatgttaactgacccgcatatgtggagggtaaaagtatgaaaagtaagttgctgccttgcgcgctgttgcttgcaaccagttttgcatgggccgcccccgcgacaacgggcattgatcaatatgagttaaaaagctttatcgccgacttcacccacttcaagcccggcgataccgttccgcaaatgtaccgcaccgatgagtataatattaaacagtggaaattacgtaatctgcccgcgccagatgccggtactcactggacctatatgggcggcgcgtatgtactgattaacgataccgatggaaaaatcatcaaagcctatgatggcgagattttttatcatcgataaaaaaagccccctcatccagagggggaaatacagccccatgttacttttttattagcccttaatcactctatccccttcaaactgccttttttgttgactgccttcactacccgattcgctctggatctcgcccttttgaaactaccgcataccacattaaaatttattgcagaaagattgtcatcccggtcacttattattgtaagtgaccggaagttcattcacctatcgcgccatatatcttaaatgtttttcatatatattaatcgtatttcacatagatcagcgcagtcgcttttagatcgcctggctttatattgtctcggtcataaacataataactggcgataatagggattgttatcatatcactgttgagcggcgtgcctacttgatccactttccataacgttgaagcattaccctgctctgctgtatttgaaatattcaccgtttttccaccgctctccagtataaatccgacgccattattcacagcaccacgcaacacagaatagctatctggtattaaatcactgctggagagataaaccgtcattttacgcgatgtttgtttagcattaccaaaaagattatcacactggagtcgaatattatccgcggcatttttgttgctgaccttgcctgtgttatataattcagaaagcgcaatattcggtagcgtgatcgtcagatcttcaggtttgcaggttgtctgcttgcgatcgtaggacacaaacagatcaaatgaatataaccctgcacctctaagataactattataatctgcggcacaggcattccaacctcttcctgctagcaggcaccctaaaaaccgcaaaccggccgtaaactgagttgcagaagaagcgcttgttattgataccaccccgttgattaggacactgttcccactaccggcagaaatatttacattcgccccagaggaagcgggttcaaccgttaccgtatagcccgttgtaaacggcattgtgagagtattattatctgcccaggcgatttttaacttcagttttactgtatcattgtataatcccacgatgatatcggaaggatccatacgcgttatcttataagtccctgaacaagttgtatcgttaaaattatggctataagttgcggactgattagggttaatcgtaaaatcctcacgaataattaaattatcctgataagtaatttctcccgtacaggctgcgtatgtttcaggtaaaatcaataacatcacgataaaaagaaagagtttcatttcaccacctcaccactaccgacaaatataaactttactttcatcaaccgttttaccaaaggtgattgaacatgaaagcccctgctctttatctactggtacactgacttcgggcggaatatcattcgttcgaataaatagctgactaccttgtccaacaatgcccacattatgaccatgatgatctactacatcataaccaaaaataagaggcgaaccatcaggacgctgcgctttaataaaccatggtttacgctggtcggtatcaaaattcactagcacgacggcccctcggtacggggcggcaactttacggttaccgcgtaattccgtttcactgctactttgcgacacatcaagcataagatggttttcgcgatatggcgtaaggttgtcataaaccaccgttccttttttattggtggtccgatatttttggccgttaacgtaggctccttcaagtcccggagcctgcataatcgcaaaggtatctgaaagccggctggataaattcaacccgccactccaggctacaaccccaccggaaatacttccgccggtctgagtataattggacgactggctgtaactaccattaagcgttgcaacgggcgtattccaggttaaattcgtccccgcagtggtctcactatcgtgtcgctgatgactaacactcacgccgtaattaaattgatcgcgactgcctgccgtaccggttaaaccaatattgtttgaggtaaatccatcatcatcaaaggtcgtcgagttcgacacattcagatgacgccgcggggtagtaataccgtccccccagtcaaagggaattgaaataaacaggttaaaacgtttatcttcattatgatcctcgtcgtaagtctgactggcggataacgtataattaattttctggaacgtattggaatagcttatttgataatctttactggtgccgctacgtccccagtaatcacgccataatgcactcagtgatactgcgccccatccttctggcaaggattggctcacattagctgaaaacgtatttttacgcccaaaatcgttttgataataatcagcaatatcgtatacatcattcttatcgcgacgatagttatttttattattggcccagacatgatcgttaaatgtgcggtaatcctgtgatgaataccgatacgcagccagaccaaaccgagttaatgtttgggtcaggtatttattataagcaatctgataactctgaccatcaaatacatcgccattatcctgtttactgtgcgctcgcgtagcgtcaagcgaaatggcgccaatccgggtattccaccccgtgccgagggtaaacgcattataatggttcgatagcatcgtaccgccataaagcgtcaacaggttattaaggccatactgataactgatttgtgtaaaatcggcctgattatcggcgccttcaatatgactacggccggcggaaaaatcatacttagagacgccaggctgcaacatgttcggtacggaagcgtaaggcaccagccaggtatttatcgaaccatccgcctcacgcacggtgacatcaagatccgcgccaccgcccgcgagttgcagatccgcaatggaaaaggggccaggaggaacctctttctgataaacaacgaatccgttctgttcgatggttaccaaagcgttagtctgtgcaatcccctgcaccaacggcgtaaaattctgtttcgagtttggcaacatttgcatatcgcgaaacaggcgaacgccggtaaatctcacagaatcaaaaatctctgacgaggtatactgatccccggcgcgtaatgtgccgaggagctcagcgataccgcgctccagatacaatgtgttgcttttccactcaccgctgctgccatcggttttattaaatgtggtatccgcatgcgcttgccagcccaacagattgaaaccgctattgaaccgaacgtaagtactttcactactgccagaattcttatagtcactgtaatactggctggcatagtaagaagtataaaatgcattgatgccgcgatcccagttttcaggcaatacataacccgcctcgacctcatttacataggcctggggaacgctcaaatccagccgaaaaacgccaatattaaaagtatagccaccgcttctcacgacatcttttaacgcaatacaatccgttgctccctgcggttgcagaccatcgcttatcacaccaatatttttcaacaactcagttgaaatacacgtgctaccgggatcatcggcaacaatgatatcgtatttacctcgccattgattgttgacataaatatccaattcgtactgtcccggaattggcttattctcatccagatggaaatttgttattttttgatctctcattccccccaccataaaatgggtatcaaacgtttccgtcgcgatagcctgcgtttgccaggtaaacagagtcaataaaacaagcgaagcgatgggcgtcatccttagcatgatgaactcctgtttattttacattcattttgctactaatatagttaccattatcatcaataatcgttacttcatactggcttgttgacgcatatttcatgttaatattttgcgtcgatagcggtggcagcatgatagtttgatcattaatcttagtatttcctgcttttacatccgtcacggtaatccagtttgcagtatcatttttcatgatgacagctttattactgcgaaataaaccaatcctctgaaaactgtctttggttacggcggcaattcgactggggcgccatattaattttattcgattctgcattgcgaatttaagcacatttttaccggcgttttcctggctgtttggtggaatatcaagcacattcagataaaacagactttctttgttgtccggtaagctattaggcattttcttgattttgatctgctgaccagactcagcggcaacgcgcgccactggcggcgtcagcataaatggcacctgaattttttctggcggtaatgaagtgttaccgtcatcaatccaggactgtaccagcgaagcttgctcgccctgattcaccaattgtacaacgacttctttcttctctgccgggtaaatcacacgcgtaccataaataacaataccagcatgcgcaggcaaaattatggcagataataatactgcagataatattttcatatttacacggccttgcttataaaaaaccggcgacgaacgccgccggttgaataaattagtcagtaacaaccgttaaagtcagtgttgagctaacatcaccagaagcaacatcaccgtctaaacgcgcatagcgtgctaaaaaagtcaggtcgtattcaccgctgctatttggatctagtgtcacccccgtctctggatcaatctgattatccgtacttccgtagtaaaccgcaaaaccgacacctttggcagacccgttattaaatgtgatatcgtggctgtcaaattgcgttgaagagaaggtaatacgcggcgctacaccctgttgacattttattttcaacggcatctgagtttgattagttactgcgtcataaatctgacccggggttaaattaattattttatccgcaccaatttcattcagtctaatttcagcggtgttcgtacccaaaaattgacaggtagtaccaaccacctttccgttaatattcagaacgcctgaatcatactcatcaacagcaaaagccccagcgctcataaatacagcagacaatacagaagcagcaataagtgaacgtttcataatctcttccttaatgaagtaatttctatttgttaagagttattaacccttgcaacgaaaattctcatagacaggaagttatcgcaatgtaaacacgatgttttgttgatttaaaacaatttacagattgcaatataattgcaacaaataatcattgcttatcattattttgtaaacttattaatttccgaaatttactgcccttaaatataaacacaacaaataaaaaagcccatatcattgatatcaatgatatgggcctgcggaattaataagaattagtcgtaatgattaacaacaatctgtcgggtgctatcaccaggcaccgtgtatagctgcgttgtcacacctctcatcggcgtagcggcgggtgtttgcagagttgaaacgtggatagtgttgccgcaacgctgctgcaactgtgcgtttaccacttctgtactgcacgttggcgcggtcacttttccactgatggttaatgttgcggtgtcggaggcaaaaacaggtacgcttatcccataagccgaaactataattcccatcagcaaatattttttcatagtgagtaattgttcctctggtgaacgtcaaacagtatgcaggccgtcctgatgagcagtatgaacgtatcgataccttaaaaccaattgaaaaaataaatcagtaggataggtatgatcaattcaaataatgtttttgccgattatttcagataaacacctgtctgtttaagcaggaattaacaatgcgggggctattattttattaatacattcactgcatcaatatatattaatgcagtgaatgtcatattctctttggaatacgtcaggaggattacaccgcgcggaaggcgatttctcccggaatcacttcaccctgccagtaaagctgtgccgcaacgcgatcggccagttcgcgatagatcgcggtaaattcgctctccggacggctaaccaccgtcggcgtaccgcgatcaagatcttcgcgcagactaatatgcagcggcatctgacccagaagctgagtatggtatttttccgccagcttctgcgcgccgcccgtgccgaagatcggttcgtgatggccgcagttgctacaaatatgcatactcatattttccacaatgccgagcaccggcacttccaccttctcgaacatcacgataccttttttggcgtcgattagcgcgatatcctgcggcgtagtcaccaccaccgcgccggtaacaggaatgttctgcgccagcgttagctgaatatccccggttcccggcggcatatccagtaccagataatccagatccggccacagcgtctcctgcaacatctgcatcagcgccttactggccattgggccgcgccataccatcgcgttatcgtcagtcaccagatagccgatcgagttggtcgccaggccgtgagacataatcggcgccatatgcgtaccgtctggcgatgttgggcgctgatcttctgcgccaagcatggttgggatcgacggaccgtaaatatcggcatcgagaaccccgacctttgcgccttcagccgctaacgccagcgccaggtttaccgccgtggacgatttccccaccccgcctttaccggagctcacggcaatgatgtttttcacgccattaatgccaggctgatttttgacgcgtttcagcgtcgcaatgttgtacgacagtttccagtcgatcgcttttgcgcccgtaatacgtaacagatcggcgctgcattgctcttttaatacctcaaacgcgctgttccagacgaacggcatgaccagctcaacgtgcagcgtatcatccatccaggcgacgtggtgcaacgccttaagcgtggtgaggttatgcttcagggttgggtgctgaaaattcgccagcgtcccggcgaccatcgctcgcagggtatctggtgatttggcctgggattgttcgttcatcccgactccttttgtagttctgaaaagtacgattgtaactttgtagtttactccagcggtaacaattattcatttacggataaatgcccttatcgattggcgcagtaattaccattttggtactatcaaagcccttttttacaacagaagaagtaatacccactatgactcaagtcgcgaagaaaattctggtaacgtgcgcgctgccgtacgccaacggctctatccacctcggccatatgctggagcacatccaggctgatgtctgggtccgttaccagcgaatgcgcggccatgaggttaacttcatctgtgccgatgacgctcatggcacgccgatcatgctgaaagcgcagcagcttggtattacgccggagcaaatgatcggtgaaatgagccaggagcaccagaccgatttcgccggttttaatattagctacgacaactaccactcaacgcacagcgacgagaatcgcgagctgtccgagctgatttatacgcgcctgaaagagaacggttttattaagaaccgcaccatctctcaactctacgatccggaaaaaggcatgttcctgccggaccgatttgtgaaaggcacctgcccgaaatgtaaatccgcagaccagtacggcgataactgtgaagtgtgcggcgcgacctacagcccgaccgaacttatcgaaccgaaatccgtggtgtccggcgcgacgccggtaatgcgtgactccgagcactttttctttgacctgccgtcattcagcgaaatgttgcaggcgtggacccgcagcggcgcgctgcaggagcaggtggcgaacaaaatgcaggagtggtttgaatccggcctgcaacagtgggacatttcccgcgacgcgccgtattttggtttcgaaatcccgaacgcgccgggcaaatatttctacgtctggctggacgcgccgattggctatatgggctccttcaaaaatctgtgcgataagcgcggtgacacgaccagttttgatgagtactggaaaaaagactccgatgccgagctgtaccactttatcggcaaagacatcgtctatttccacagcctgttctggcctgccatgctggaaggcagccacttccgtaagccgaccaacctgttcgttcacggttacgtgacggtgaacggcgcgaagatgtctaagtctcgcggcacctttattaaggccagcacctggctgaaacactttgacgccgacagcctgcgctactactacaccgcgaagctttcttcacgcattgatgacatcgacctgaacctggaagactttgtccagcgcgtcaatgccgatatcgtcaataaagtagtcaacctggcctcgcgtaacgccggttttatcaataagcgtttcgacggcgtgctggcggctgaactggccgatccgcaattgtataaaacctttactgacgccgctgcggtgattggcgaagcatgggaaagccgtgaattcggtaaagctatccgtgagattatggcgctggccgacatcgctaaccgttatgttgacgagcaagcgccgtgggtggtggctaaacaagaaggccgcgacgcggacctgcaggccatttgctcaatgggcatcaacctgttccgcgtgctgatgacgtatctgaaaccggtactgccgacgctttctgaacgcgttgaagccttcctgaacagtgagttgaactgggatgccatcgaacagccgctgctcggtcacaaggtcaacacctttaaggcgctctacaatcgcatcgacatgaagcaagttgaagcgctggttgaatcgtctaaagaagaggtgaaagccgcagccgcgccggttaccggcccgttagccgacttcccgattcaggaaaccatcacctttgacgatttcgccaaaattgacctgcgcgtagcattgattgaaaatgctgagttcgtagatggttctgacaaattgctgcgtctgacgctggatctgggcggcgagaagcgtaacgtcttctccggcattcgttccgcctacccggacccgcaggcgctgattggccgccagacggtaatggtcgccaacctcgcgccgcgcaaaatgcgctttggcgtctccgagggaatggtgatggccgcaggacctggcgggaaagatatcttcctgttaagccctgatgacggcgcgaagcctggccaacaggtgaaataagcaacaagccggagcatgctccggcttttttaaccgcttaatcctgactggcatatcaccccatccgcgtgttttaactttttccttaataagcaatagcgttaagactccatatccggactgctaaataacggctaaaagtcatattctatctctccctgatacattgctattactgggttaaattaattcattgaaattattttaaaaacccaatcattatataaaatggagttttagatgaaaatttctggcaagttattgtccgcggctttggcttccgtactggtgttctctcttgctggctgtggcgataaagaagaatcaaagacctttaacgcaaacctggcggggacagaaatttcaattacttacacctataaaggtgacaaaatcattaagcagacgtctgaaagtaaaatcagctatgccactgtaggcgctaaaacgaaagaagatgccgccaaaattctcgatccgctgagcgcgaaatataaaaatatcgccggagtggaagaaaaattaacctatgaagatacctatgcccaggaaaacgtctctgtggatatggaaaaagtggactttaaagcgttacagcaaatctcagggacgatggtgtccggcgataccagcaaaggtatcagcatgaaacaaacccagacgctgctggaagctgctggttttaaagaagcgaaataactggcaggcataatgtattgcatcgactggtaaagtcgctcagggcgctgcttcggcagcgtcttttctttatgaattccgaaaaaagacagcctcgctgtaagtcccctcgccaaagcctataatccctgaattcttggccacaccaatacttaacgacaaggaattgttatgcaggttctacgtcttatggcactgccactattcgcgctctctctatcggttagcataactggctgcgatcagaaaaacgatactctccagggaaagcaaaataacatgacagcgtttatcaagaagatagccgctagcaaagagtcagaggaaacacaacgctatgtaggtaatctcaacggtattgaaatcaagttaacctattactacaaaggggatatcgttttacgtcaaatatctgaacataaactactttataagaccctgaaagccaataataaagaagaagcacaaaaaatgctgagtcaagtcggcgaagcttatcagggtatgccgggtttgactgaacgaatcgactattatgatagctatgctacggaatatgtggatattaattttacccaggcaaaaataagcgacctctgtaaattgccaggatcatcaattgacaactgttccgcgtactatctgtcaatgattcgctcgcagaaactgctggaagagagcggatatcatagaatcaattagtataataatgcgttttcccggtcagacaggacgctgccgggaacaataccgcagaattacttcgccgcgtgttcacgggctgccagaccgcgcagaaaataacgcataaactgatcgccgcattcgcggaagttcttatggtccggcgcgcgcatcatcgcggtgatctctggcattgagacacgaaacaactgaccggtaagtatcgccaggatatcatctgtttttagcgaaaaggcgatacgcagctttttcagcacaatattgttgttgatacgacgttccgccgtcaatgcaggcgccgcctcatctttgccgcgtttttcataaatgaggccattgagaaatgaggacaacacgatatccgggcaacgctgaaacccctcttcctcttctttgcgcaaccagattgcaatctgctccggcgtagcatcaacgttacccagcgccaggatacgcgccagatcggtattattagcttttaaaatgtagcgcacgctacgcagaatatcgttactcagcatgaggccttcggtcgtttctatggcaaaacgatattctaacagtcttttacaggccaatcgcctcttttaaacttttcagatagcgacggcttaccggcaccgtcaggccgttgcgtaaaatcagctctgcctgcccattatcctccagccgtatttcctgcaaatgggccatattcaccagaaactgacgatgacaacgcagtagcggcgtccggctttccagcgtgcgcagcgtcagctcggtaaacccctctttcccttcactgctggtcacataaacgccgctcatacggctactgacaaaggcgacatcatccatttgcaacaaatagatccggctgtgtccggtacagggaatgaatttaagcgcctgctggttttccggcaacaacgaaacatcctgtttactgcgctcctgacgcagacgatgtaacgttttttccagccgtttctcctctatcggcttgagcagataatcaaaagcgtgttcttcaaaggctttgatggcgtattcgtcaaacgcggttaaaaaaacgatatacgggcggtgttccggatcaagcattcctaccatctccagtccactgatacgcggcatctgaatatccagaaacagcacatcaggtcgcaacttatgtaccgcgccaatcgcttctaccgcgttcgcgcactctcccacaatctcaatgtcatcctgcccctggagcaaaatccgcagattttcccgcgctaacggctcatcatccacaatcagcactttaatcatgcgtcctcctccagtggaagtcgtaatgtaattcgggtaaaacagtccggctcgcaggccacgctaataccataatcatcgccaaagtgttcgcgcagacgtttatcaaccagactcatccccagcccgctactgccggcggaaggctgatacagtcccgcattatcctcaatatctaacatcaaatgctgcccttcgcgccgggcgcgaatagcgacgttgccggtatcaagcagttgcgacgtgccatgtttaatggcgttctcaacaatcggctgtaatgtaaacgcaggcaatttctgacgtgaaagcgtcgatggaacatcaagctgtacctgcagacgcgactgaaaacgcgctttttcaatttgcagataagcgtttacgtgttcaatttcatccgccagcgtgacgatttccgacgggcgttttaaatttttgcgaaaaaaggtcgacaagtactgcaccagttggctggcctgttcgctgtcgcggcgaatcaccgctttaatggtattgagcgcgttaaacagaaaatgcgggttcacctgcgcgtgcaacagcttgatctctgactgcgtcagcaacgccttctgccgttcatactgcccggccaggatctgcgcggataaaagctgcgcaataccctctcccagggtgcggttaattgagctgaacagtcggtttttcgcttcgtacaatttaatggtgcccatgactcgctgattttcgccacgcagcgggatcaccagcgtcgaaccgagtttacactgcgggtgtagcgaacagcgatacggcacttcgttgccatcggcataaaccacctctccggtttcaattgctttcagcgtataacctgatgaaatgggtttgcccggtagatggtgatcgtcgccaataccagtaaaagccagcagtttttcgcgatcggtgatggcgacggcgccaatatccagctcctgatataacacctgcgccaccttcatactgttcacttcgttaaatccctgacgcagaatcccctccgttgacgcggcgaccttcagcgcggtagcagaaaatgccgaagtatatttttcgaacatggcgcgcttatcgagcaaaatacgcatgaacagcgcggcgccaacggtattcgtcaccatcatcggcgcggcaatattactgaccagatgcaaggcatcgtcaaacggcctggctatcagtaaaatgatcagcatctgcaccagttcggcaatacacgtaattgctcccgccgtcagcgggctaaacactttgtccgggcgtccgcgacgtatgagaacgctgtgtaccaacccgcccaacagcccttcgacgatggtggaaatcatacagctcagcgccgtcatgccgcccatagaataccgatgtaacccaccggtcagaccgaccagcccgccgacgaccggcccgccgagtaggccgcccatcaccgcgccaattgcgcgggtattggcaatcgaatcttcgatatgcagcccaaaataagtgcccatgatgcagaagatagaaaacgtgacgtaacacagaagcttgtgcggcagacgaaccgtgacctgcataagcgggatgaacaggcgcgttttactcattagccacgcaatgaccagaaacacgcacatctgctgaagcagcagcaacaccagattaaactcgtacatacccgcaaaccacacttcaattaaaagcgcgtaacatacattgagtacgattaactttctttgaactgttgcataaaaatatgaattcgtgaatacgatcacttaaacgccgcgccgcaacccgctacttcgcgttttaatgcataaaaaacaggcaaaacttcctggttcctaaaagagcgtctaaagttaaaccgggacctcgcgagcaagggtgaaacgatggcgctttacacaattggtgaagtggctttgctttgtgatatcaatcctgtcacgttgcgcgcgtggcagagacgttatggacttttaaaaccacagcgaacggatggcggtcatcgtctgtttaacgatgccgatatcgacagaatccgcgaaatcaagcgctggatagataacggcgtccaggtcagcaaagtcaaagtgctgctcagtagcgacagtagcgaacaacctaacggctggcgcgaacagcaggagatcctgctgcactacctgcaaagcagtaatctgcacagtttacggttatgggtcaaagaacgcggtcaggattatcctgcccaaacattgaccactaacctgttcgtcccactgcggcgacgattacagtgccaacaacccgcccttcaggcgctgctcggcattcttgacggtatcctgatcaactatattgcgctctgcctggcgtctgcgcgtaagaaacagggaaaagatgcgttggtgatcggctggaatatccatgataccacccgcctgtggctggaaggttgggtcgccagccaacagggatggcgaatcgacgtgctggcgcattcgcttagccagttccgcccggaactgtttgacggcaagacgttactggtatggtgcggagaaaaccagacgctggcgcagcagcagcaactcctggcatggcgcgcccagggacgcgacattcatccccttggcgtttaaacagaagctaacaaattcgctttaatgtatactccttttattaacataaggagtacataatgcgcgtagcgaaaatcggggtgatcgcccttttcctgctgatggctattggcggtatcggcggcgtgatgctggcaggttacagttttattttgcgtgccgggtaagcacgcgcgtcagcctttcaaacaggcgatcgataatgatcgccgccagcgccaccagcagcgccccctggataacataggccgtattaaagccgctaagcccgataatgatcggcgtgcctaacgtactggcccccaccgttgaagcgatggtcgccgtaccaatattgataatcaccgaggttcggatgcccgccagaatcaccggcgcggccagcggcagctcaacctgatacaactgttggcgacggctcattcccataccgctggcaacgctcatcacgctggcaggcaccgcgcccagcccggccagggtcgcctgcaggatgggcaacaccccatacaggatcaaggcgataatggccggttgctgaccaaaacccatgacgggtaccgcgatcgccagtaccgcgaccgggggaaaggtctgcccgacggcggcgatagtctccaccaggggacgaaactctttcccactttctcgcgtgaccgcaatccctgcgccgacgcccaccacgacggcaaacaaacttgagatgcccaccaaccagaaatgggcgagcgcgagggcggcaaaactctcctgttggtagaccgggcgcggtaaatcgggaaacagcgcggcgaagaacggctggctataaggcaatccaaacagcagaagcaagaacagaacaataagccagagaagcggatcacacagtcgtttcacggggggacgtctccgaaagcagatcgcggaaatggagcgtaccgcagggctcgccctgctgattcgccaccggcaggacgtcgcaccgacgggcgacaaacatcgatagcgcatcgcgtagcgtcatctcttccaccagcgcgtcgccgctgagctgttcatgccgacgtacataatcgcctacgctacgtaacgaaagcagccttacgcccagctcgctgcggccaaaaaatgcctgcacgaaatcattttccggcgaggtcagcatagaaagcggcgatccctgttggataacgtggcccccgtccatcagcaccagatggtcggcgaggcgtagcgcctcgtcgatgtcgtgcgtcaccagtacgatggtgcgccccagcagctgatgaatgcgggtcatctcctgctgcaatgcgccgcgcgttaccggatcaagcgcgccgaaaggctcgtccatcagcaatacctgcggatcggcagccagcgcccgcgcaacgccgacccgctgctgttgcccgccggaaagctgatgcggatagcgatcgcgcagcgcgctttccagacccaataatgccatcagttcatcaatacgatcgttaatccgcgcacgcgaccacttttgtagttgcggtacggtggcgatattttgcgccaccgtccagtggggaaaaaggccgatagactgaatggcatagcccatgcgacggcgcagttcaagcaccggcaggctgcggatctcttccccggcaaaacggatcgttccgctatcatgctctaccagccggttaatcatcttcagagtggtcgattttcccgagccggaggtgccaattaacaccgaaaagctgccttcgctaaaatgcaaattgaggtcgctaacagcctgttgatcgccgaaggttttactgacatggttaaattcaatcatcggttgctcccttcagaaacgcgatccataaatcaaacagcgcgtcgatcactaccgccaacgcaatcaccggaatgacgcccaacaggactaaatcaatggcgctgctcaatagcccctgaaacaccagcgcgccgaaacctcccgcgccaatcagcgcggcgacgacggccattcccactgtctggaccattactacccgcaggctacgtaaaaagaccggcagcgccagcggcagttgcacatgcctgaagcgctggccgctactcattcccatggctcttgcgctctccagcacatcgcgcggcacctgattgagcccggcgaccacgccgcgcaccagcggcaataacgcatagagcaccagagctatcagcgcaggcgtcatgccggttcccgcgacgccgaatgcggcaagccacggaaactgtttcaccagcccggccaacggcgcgatcagcaggccaaacagcgcgacggaagggatagtctggatcacattcagtacggtaaacaccggcccctggcgcgaggcggaaaaataacaccagacgcccaacggtaatccgatcgccagcgccggcagcaccgtgcccgccagtaacatcaaatgttgcaccagcgcggcatcgaaaacatcctggcggttggtatactctttcagaagcgagaggttgtcgaacgtgcctgaaaacagcagcgccagcgggacaatgacaatttgcgcgtgcagcaaccagcgccacagcggcccagtggtaatacggcggatcgcatcgctacaggccagcaacatcagaccgaggcccagccacaatccacttcccagactggtacgcgccagcgggctgccctcctgcgccaactgggtcgccgccctgccgactccccacagcatgacaataaaaagcgtctgcgccatcatcagcgtcagtacgctaccgcgtttaccgggtacaaagcacagcgtaaacagcgcgcatcccgcgccagtcagcatccagatggtcgccggccagatctcccataactggcgcccctcgccgctcaccagacgattcggggcgtaattaatgaaaggcagcgcgacagcaagcaaggtcagaacaaccaacagcaacagcacacgattaaccgtgatttttttggcagcatcactcacagattacttcacccaccctttttgtcggaggtaatctgcggcgacttttttcgcatccagcccttctacggcgattctggcgttcaactgttgcagcgttttctcatcaaggctggcgaaaacgggctgcagccagtcggctatctgcggataggcctgtaacaccgattcacgcactaccggcgcgggggcatagataggctggacgccttttgggtcgctcagggtttgcagacccagcgcggcgacagggccgtcggtgccatacgccatcgcggcgttaacgccggatgtttgttgcgcggcggctttgatcgtgaccgccgtatcgccgcccgccagcgacaagagctggttctgattcaaggtaaaatcataggctttttcaaatgccggcagcgcatccgcccgttcgataaattccgcagacgccgccagtttaaaagtgccgccctctttcagataacggctgagatcggcaagcgaggagagtttatttttttccgcgatgtcctgacgtatcgcgatggtccaggtgttgttggccggcgcaggcgtcaaccagaccagcttattctgctccgcatccagttttttgactttctcaaagccttgctttgcatttttccatgccggatcgttttcatctttaaaaaagaacgccccgttaccggtgtattccggatagatatccagctctccggcggtaatcgcgccacgaacgactggcgtcgtcccgagctgaattttattgaccgttttaacgccgtggctttccagtacctgcaaaatcatgttgccaagcagtgcgccttcggtatcaatctttgacccgaccgtcacgggcgatgccgcctgtagaggtaaactcaccgtcgccagcaacgccagcgaacttacccatagctttgagatcgtcatgatgctttcctcatccttttacggcctttttcagagacttgagaaaaaagcatagttgaaaagtctgcgtttaacctgggattttccgccagtttaagtgacgtggcaggcaataaaaggggggacaggaaaagtcattgccagacagggcgctgctatcgcgccctgttgacggcaggcttacagtagctcgaacgatccttgtttaacgcgagcggaatccacgccgataaagacgttgaacttgccgggttccgcgtcatatttcatctgctgattccagaacttcaacgcctcgatatcaatcgggaaactcacggttttacgttcgccgggcttgagggtgattttttcaaagccttttaattgcttcaccgggcggctcattgacgccgtgacatcctgtaagtacatctggatgaccgtagccccttcgcgtttaccggtgttcgtgacctctacgctggccgtgactttgccgtcgcgttgcattgtcggtgaggagagcgtgacgtcagacaccgtaaatgtggtgtagctcagaccgtaaccaaacggatagagcgggccattcgcttcgtcaaaataacgtgaggtgtatttgtttggcttttcaggattatacgggcgtcccgtattgagatggctgtaatagaccggaatttgtcccaccgaacgcgggaaggagatcggcagtttgcctgacgggttgtaatcgccaaacagcacatcggcaatggcgttgccgccttccgtcccggcaaaccaggtctccagaatcgcatcggcctgttgatcttcttttaccagcgccagcggtctgccgttcattaataccagtaccagcggcttaccggtggctttcagagcggtgattaagtcgcgctgactctgcggaatggtgatattggtacggctggaggcttcatgcgccatcccctgcgactcgcctaccactgcgaccaccacatcggcctgtttcgccgcctgtacggcctcatcaatcatcgcctgcggtgagcgcggatcgattttcaccgcctcttcatacaggtttaagaaatcgacgatgcctttatcattagtgatattcgcccctttggcatagaggatcttcgccccgtcgccgacggcattttgaatacccgccagcaccgtcactgactgattcgcgaccccagcagcagaccagcttcccattacatcacgttgactgtcggccagcggcccaacaacggcaatggtgcccgattttttcagcggcagcgtttccagccggtttttcagcagtaccacactttcccgcgccacttcccgtgcctctttacgatgcaggcggctttcggcattggtgtccaccgggtcgctctctttcggccccagatggctataggggtcgttaaacaatcccatgtcatattttacgttgagcacatggcgcgtcgcgtcgtccagttccgccatcgtcactttgcccgacttaatcagacccggcagatatttgctgtaatactcatccgccatgctcatatccacccctgcctttagcgccacgcgcaccgcatcttccgggtcggccgcggtaccgtgtttaatcagttctttaatagcgccgtggtcggaaacggtaattcccttaaagccccactcatcgcgcaggacatctttcaatagccaggaatctgacgtcgcaggcgtgccgttcagcgagttcagcgccaccatcaccgcgccgctccccgcatccagccccgctttgtacggcggcatgtagtcattaaacagacgctgggaactcatatccacggtgttgtattctttaccgccttcaacggcgccataggcggcaaaatgtttcacgctggtcatcaccgaatagcggtccgccgggcttttgccctgcatcgctttcaccatggtttcgcccatgatagaggttaaatatgtatcttcgccaaagccttcggaggcgcgtccccaacgcggatcgcgggagacatccaccatcggcgcccaggtcatattcaggccgtcgtccgccgcttcatacgccgatacgcgtcctacggttcttaccgcatccagattaaaagaagaagccagaccgaggcttatcgggaagacggttcgctggccgtgtaccacgtcataggcaaaaaagagaggaattttcaggcggctcaacgccatcacctgatcctgcatttgacggatatcctggcgggtgacggtattgaaaatcgcccctacctgcccgtctttgatcatctcgcgaatcgcttctttcgggttatcagggccgacgctaatcagacgtaactgaccaattttttcatcaacagtcattttcttgagtaaatccgtgacgaacgcgtcgcgcgcttcgggcgtcagcgggtgattgccaaacaggttttccgccaatgctggctgcatcgccagactcacagcaacacctactgaacataaccatttcatgttgagtctctctttatctttatcccgacgaggcggtaaaaacagaataaaaaccgcagtttgccataagcctaaacgcgagaggagaagaaagcgaaggttattctcctaattttccgcacagtcgaatacacaaccgccagcaaatggtatcaaggcggcaaatgaataccaccaacacagaaacaatttgaatgagaaagcgtattgtcatacaaagcgctatgcttaacgctgatattttgtcccaccacaaggagtggagaatgtcttccataacaatgactgataataaaacgttcctgaatgagctggcccgcctggtaggccattctcacctgctgacagaccccgccaaaaccgcccgctatcgcaagggtttccgttccggtcagggcgacgcgctggccgttgttttcccgggttcattactggaactgtggcgtgtgctcaacgcctgcgttaacgctgacaaaattattctgatgcaggccgccaacaccggtctgacggaaggctccacgccgaacggcaacgactacgatcgcgatattgtgattatcagcacccagcggctggataagctgcacttactggataacggccaacaggttctggcctggcccggtacgacgctctatgcgctggaaaaagcgcttaaaccgctgggccgtgaaccgcactcggtgattggttcgtcgtgtatcggcgcgtcggtcatcggcggtatctgtaataactccggcggctcgctggtgcagcgcggcccggcctataccgagatgtcgctctttgcccgtattgacgaccaaggcaaactgcaactggtcaatcatctgggtatcgatcttgggcatacgccggagcagatcctgagcaagctggatgatgaacggattaaagatgaggatgtgcgtcacgatggtcgtcatgcgcacgatcacgactacgtgacgcgggtacgagatatcaacgccgatacgcccgcccgctataacgccgacccggaccgtttgtttgaatcttccggctgcgccggaaaactggcggtttttgccgttcgccttgatacctttgcagcggaaaaaaatcagcaggttttttatatcggcaccaatcagcccgcggtactgactgaaatccgtcggcatattctggcgaacttcgacaatctgccagtggcgggagaatatatgcatcgcgatatctacgatattgcggagcagtacggtaaagatacctttctgatgatcgataaactcggcaccgacaagatgccattctttttcacgctaaaaggccgaaccgatgcgatgctggaaaaagtaaaatttttccgtccgcatttcaccgaccgcgcgatgcagaaattcggccatctgtttcccagccatctgccgccgcgaatgaaaaactggcgcgataaatatgagcatcatctgctgttaaaaatggcgggagacggcgtcgcagaagcgcaacgctggctgaatgaattttttaaatccgctgagggcggtttcttcacctgtacgccggaagaaggcagcaaagccttcctgcaccgcttcgccgctgctggcgcagcgattcgttatcaggccgtacacgctgatgaagtggaagatatcctggcgctggatatcgccctgcgccgcaacgataccgactggttcgagcatctgccgccggaaatcgacagccaactggtacataaactctattacggtcactttatgtgccacgtttttcatcaggactatatcgtgaagaaaggcgtcgacgtccatgcgctgaaagcgcaaatgctcgagttgttgcaggcgcgcggggcacaatacccggcggagcacaacgttggacatctgtataaagcgccggaaacgctgacgcgtttttatcggcaaaatgacccgaccaacagtatgaaccccggtatcggcaaaacgagtaagcggaaattctggcaggaaaatacgcccgacgaaacgcattaacaccgtgcggtttaccgtgaagcccggcggcgcgatgcctgccgggcctgcggcgacttaatcgttctgtgcggtttgcgctccggcactggcgctggctgccgccatttgcgcggctttttgctttttatagctcagcgcggcagccggaacgggcatgactttaccggtttcaatccatgtacgcaggcggctggcgtccgcaaagtgggtatatttgccgaacgcgtccatgaccaccagcgcgaccggtttgttattgatcacggtacgcatcaccaggcaatgccccgccgcattggtaaatccggttttcgttaactggatattccagttatcacggtagaccaaatggttggtattgcgaaacggcagcgtatacgccggatgcgagaatgtcgccatgtcttcgcgcgtggtgcttagctggccaatcagcgggtattgcttcgtggcaatcagcaattttgttaaatcccgcgcggtcgagacgttatgaatcgacagccccgtaggctcaacgaagcgggtatgcgtcatgcccagcgctttcgccttcgcattcatcgctttaataaatgcgttataaccgccaggataatagtgcgccaggcttgccgccgcacggttttcggatgacatcaacgccagcagcaacatatttttgcggctaatttcgctgttcaggcgcacgcgggagtaaacccctttcatttccggcgtctggctgatatcgaccttcagtatttcatccagcggcaatcgcgcgtcgagcacgaccatcgctgtcattaatttggttatcgaggcaatcggacgcaccagatccgggtggttcgaatagatcactttattggtgttgagatcaacaatcattgcgctaccggaggcaatctcaggttgagacgccgcggttgtcgctgccgttttcgccacagcctgcggggcaaaaggtacggccaacatcagagcaaggctcaggaatgaagctcggaatttcagcatgatgagatttctgataatgattcacgcgcgtcgtaacgcacaccgcctgagctaagattatactcaagctagcagtggcatcatagcggcacgccagcgttgccgctacagaagaatcgtcagcaaatgctgcattgctggcttttgcgccagccctttttctcatcagaacaggcggtagccgtatccccacaggatcacggtgatcgccagtagcacctccaggaccagcacgccgatagcgagcgtcgaactggagaagcttaatccttcctctctattaatgttaaggaaagtcggaatacccaaatacagcaaatagccggtgtaaaaaagcgcgacagcgccgaccagtgcgcatagccataccaggggatagagcgccaccagaccacttaaaaacagcggcgtcgcgacatagccggcaaaaaccatacagcgcgcaagcgatggccgttgcggatagtttcgcgccatccaccagatgacgcgtcccatcaccgcgacgcccgccagcatcacgccgtagaacaagaccgccagcgcaaaagcggtaaacagcgagagttgtaacacgttgccgtcgccaaaattccagccgatttgcgtcgtgccgataaaggcgcagacgacgggaatcgccgccatcagcaaaacatggtgcgtatagtgatgcgaaacagtttcgttttcgcttttgatcacctgcatttcccgatcgggatgggaaaaaagcccccatacatggttcatactgcccccttctgctgcctcagatgccagtatgttcaagtataattcagtttctggttattttatgaacaatggcaaaatagtctccggcaaaacgtcggctttgccgcgcacgcctcttgccagggtgtatgcttaatgccggaggtggtttacgcatggatatcaacacgcttattacgcattatggctatgcggcgctggttatcggcagtatggccgaaggtgaaaccgttaccctgttggggggcgtcgcggcgcatcagggattgctcaagtttccgctggtggcggcggctgtcgcgctgggagggatgatgggcgatcagctactttatctgttaggacgatgctatggcgggaagatcctgcgtcgtttcccccgttatcatacgaagattcgtcgcgcgcagaaaatgatccaacgccatccgtatctgtttgtgatcggcacgcgttttatgtacggcttccgggtggttggcccgctgctgattggcgccagccgcctgccgcctaaaatttttctgccgctgaatattgtaggcgcgctgatctgggcgctgctgtttaccacgctgggatatcttggcggcgaggtgatcgcgccatggctgcacgacctcgatcagcatctcaggcacggggtctggctgattctggccatcgtcctggtggtgggcgtgcgctggtggctgaaaagacgcggcaaagcggaggcccgttaaacccgatggtatccggatggcataacgccgccatccggcacccggcgtttattttgcgttgaattgcggattcgccagcataaacccgccgtcgacaatcagcgactgaccggtggtgtagcttgctccttccgaacacagccaggcgacgaggctggctatttcatgcgtagaacctggtcgggcgatagggattgagggttccgatcccggctcaatgtcgctgtcatccatatcattcatcggcgtggcgatagcgcctggcgcgacggcgttgaccaaaatatgatgctcaatcagttccagcgccatggatttagtcaatccccccaacgcatgtttcgccgcggtataggcgctggcttgcggaagcggcgtatgctcatggacggaggtgatgttgataatgcgccctccctctccttgtttaatcatatgccgggcggcgatctgcgcgcagagaaacgcgccatcgacgtccacggtaaaaatttgccgccactgcgtaaacggcatatcaataaacgcggatttggtcatcgccccggcattattgaccagcacgtcaacgcgccccaggcgctgaataagatgttcaatggcctgcgcgccctcgggtaactggctcaggtcaagatgaatggtctctgcccgcacaccaaactgcgccgctttttttgccgtctcctgcgcgccgcgttcatcggaatgccaggtgataccaatatcaaaaccgttttgtgctaataacaacgcacacgctttgccaattcccgaatctgatgccgttacaattgcgactttggtcatattcctctccggatgaatcatacacagcctaagtataggaaccctgtctgaatcatccggaaaaatcaggaatgataaccgccgcccagcgcgctggtaagctgaatagaggcatccagccactggccctgcaacagcaagccgttacactgctcgcgcagtgccgggattttggcctcgctcacgcgggaacccgcaataataccggcattaaagcgcgcttgcgccagaccgaccacacgctgcgcgtcatgctcaatctgctgctgatgctgatttttctgcgccagcgtctctacctgactggcggcgcgcgccacatcattaaccgcatctaccaccgctttgttgtagttggcgatagaaaggttgctttgcgctttggcgatatcgaggttggcattcagcctgccgctgtcgaaaatcggcagcgtcagcccgccggtaatgccatattgctgtgcggaatggcggaacagatcgctcagatgtaacgcatcctgctgtaaaaaagccatcagattgatatcgggataaaacgcggccttcgcggcgtcaatgctgctcaacgaggattcaatgtaccagtgcgcggcctgtagatccgcccggcgcgccagcaacgaatagcccagttgcgacggtaactggctttcaacggcggggagactcacctgacgcagcttgagcgccgccgattgcgtattggttaacgcgctgagccgcgcttcaataaccttcattttaccgttaacgtcattcaactgctgctgggttttgctggcgtcgatatcggtctcgaccccttcaacagaagaagtaataccgtgttgatacagctcccggtttaccgccaccacgttttgctgctcatgctcgatttgcatcagcacatttttcagcgctgcctgtgtttgccactcccagtagagtcgcgccacgccgcttgccagcaattgtcgggtctgctcctgctccgcttcgcgcgctttgaccgccccgatccgcgcagtaacttcagcgcggtttttcccccataaatccagatcccagcccgccgtcaggccgaatgtaccgttggtataccacggcccggtcgttcccgccgcagggtcggtaatcgcgaatggccccatcagcccttccgcggacattcgctggcgctcaatgtcggcagaaaagtcgagctgcgggccgtcctgcgcctcaaccgctttcgcctgcgcttccgccagttgaatacgctgttcagccacctgcatatccggcgaatgctgtatggcattatcgatcagcgcgtcaagctgcgcatcgtgatacgccttccaccactggctatccggccaaccgtttttcaatgccgccggcaggctggaatcaacatgagaagagggcgtctgctgggtcagcgactggcgggtatcgtgcatgggggcgcaacccgccagcaaaataaaaagcggtaagctcgctgtcgcggcaaggaaagaattacgattcatggaggtgttctgataaaaaaaggtgcgcagagagtacgtcttacggcgatctattttttagttacgcgtggcaatacatcatcagacaacaaaagacatattttgaaatttatatgattagtaaataatttcatctgatacattttttgatgtaatacttcaatgaaaagtcccactaacccgttcataaatgaacgattttgctgcaatacgcgccagcagccttcatgagttaaacgtcgccgcgcccaacaaagcagcagatggcttaatactttcctatactttgtttgtatttaccaataaagggacaaacaatgaaaattcttctatgggcaatcttaattatttttctgattgggctgttggtggtaacgggcgtgtttaagatgattttctgattcctgcgccgggcagcgatagtatctgcccggcacacgttctggacgctgtagagattagattttaatagcctgaatcgcccgcgcaatctcggacgaacggtttaacgcccgaatcgactgaaagagttccgtcgcctcaatatattccttacgtaaatatcccagccactgtttaatacgcgcgacatgatataaaccggtatcgccctgcttttccagtcgggtatatttttgtaataacgtcaccacttccggccacggcatacgcggctcgttatacttcaccacccggctcaggttaggaatatttaacgccccacggccaatcatcaccgcatcgcagccgctggtcgccatacatgcctgcgcgctctgccagtccaagatttcgccattcgcgataaccggaatagtcagacgctggcgtatttcgccgatcgcctgccagtcgatatgctcggcgcggtagccctgcgctttggtacgaccatgcaccaccagttcactggcgccagcctgctgcaccgcatcggcgatttcaaattttctatcgccgctatcccagccgagacgcacttttaccgtcaccggaagatgcgacggtaccgcggcccgcatcgctttcgcgccctgatagatgagttcgggatctttgagcaatgtcgcgccgccgccgctgccgttcaccacttttgacggacagccgcagttcaggtccacgccatacgatcccaacgccgtcgcccgcgcggcgttttccgccagccactgcggatgctggcccagaagctgaatacgcaccggcgtgccggacggcgtgcggctggcgtgatgcaactccgggcagatgcgatgaaacacttttaccggcagcagctgatccaccacgcgcacaaattcggtgatgcagagatcgtaatcattcacttcggtcagcagctcgcgcactaacgcgtcgagcacgccttccatcggcgccagtaaaacacgcatatcggtatccacagcaaaaaaagaggcgctatcataacgcctctctgcgatgagcaaaactttttgccgggtggcggcgcaaacgccacgctacgtcacgtaaagtgctcaacgcggctcaagacagttatcttctttccagccgtacagccattcgataccgcgataaaacgcctcctgcgatttccctttccacaacagattacgcacctgacgctccaccccggcggcgtgatagagacgccccatctcgcgggtagaccagacgatacgcgccgtgcggggaatacgcaccgactcatacagcgcaaatgcctgctgcgcgtcgccgtcgcagcgttccagcgctttgcctagcgtgacggcgtcttccagcgccatacaggcgccctgggccatatattgcgccaccggatgcgcggcgtcgcccaccagagtgatacgctcggttccccattttgcgaccggctcgcgatcggcggtcgaccagcggcgccaggaggtcggcttatccagcatctggcgcgggcggggatgaatgccggcaaaataagagagcacctcttctttactgccgtctttcacgccccactcttcttgctggcggctgtggaatgtcaccaccagattgtactgttgacctccgcgtagcggataatggaccaggtgacaatgcgggcctgcccacagcaccggtgcgttaatacgtaaatcgtccggcatatcgtcgcaatcaatcaccgcccgatagactacatgccccgttacgcgcggcgcgtcgccgagtaaactttgccgcacgaccgatttaacgccgtcgcagcccacgagaatatccgccgtccagctatttccctgctcatcaaacaccgtaacgtcatccggcgtctggcggatatcgacaatatgggtcgaggtacgatactccacgccagggtgcgtcagcaccgcttcccataccgttgcatgaatatctacccggtgaattaccgcatacggcccgccaaaatggtcgcggaacgcctgtccggtttcaatgcataccacttcttcggcattcacggcatccatcatggtaatgtgatcggtaaacaccgcacgctggcgggcaacatcgcccacaccgagactatccagcgccgaaaaagcgttcggcccaagctgaatacccgcgccaatctcgccaatttcgtgcgctttttccaacagcatgacttttattccctggcgcgccagcgacagcgcggtcgccgcgccgccgattccgccacctacaataattgcgcttgtcacgtgagtcatggtcattctccttttcaggccgggattttatcttgttgattttccggcgcggcggcaataaacgccggtagctgtacgcaggcgtcataaacggctttacagcgcggatagcctgataaatcgcagcccatcctgagcgcattcgcccactgaggaatcaggcagcagtccgcaaggcctggcgcgtcgcccacgcagaatcgtccggactgacttttacgcaatagctgctctaccgcgcttaacccttgctgtatccagtgggcgtaccagcgttttttatcctcttcgctaaccttcagctcatcggtcaggtagcgcaacacgcgcatgttattgattgggtgtatatcgcaggcgatagcgtagacaatttccagcgcctggctgcgcgccgggtcgctcgtcggcagcagcggcgtttgcggaaaatgtcggtccagccagtcgacgatggccagcgattgccccaacgattcgccgtcatcagtgaccagcgtcggcaccaggcctaccggattcatccgtcggtaggccagcgcattctgctggccgatacgaatattgacgcccaccgtctggtaatcaatcccctttaacgccagcgcaatacgtacacgataagacgccgaactattaaagaaactgtacagcttcatcgttcacctcagacaattttcacagcaatcggcgtcagaccttctacgttcccggtgatgacatcccctttcaccactgcgcccaccccctctggcgtaccggtgaaaattaaatcgcctggctgcaattcaaagaagccggacaaatagctgatggtttcattcaccgaccaaatcaggtgacgaatatcgctgcgttgatggtcttcgccgttaacctgtagccaaataggggcgttatccacattatgcgtttcagcggctttgtgtaatggcgcaatgggcgcggagagatcgaacgctttgccgatttcccacgggcgtcccatctgacgcatttccatctgacgatcgcgacgcgtcatgtccagaccggtggcgtatccccagacatattcatgggctttttccagcggaatatcgctcccctttttaccaatcgccaccaccagctcaatttcataatggtagttatcggtctgcgccggatacggcagttccagggtatcccccgccgctaccgggaccacagcgtccgctggtttacaaaagaagaacggcggttcgcgatcgggatcaaagcccatttcacgggcatgggcggcatagttgcgacccacgcagtaaacgcgacgtaccggaaactgctcatcactgcccgccacgggtactgttaccggggcctgcggctggaatacatatttggtcatgttctctctccctaattaataacgtgcttcgcggaacagccccagggcttcctgaaccggcttgtccgaaaaactgaataacaccgtgtcttcgctgctgcgaaacgacacctcatgccaggtcggcgccacaaaaatgtcttttgcggaaaaatgaaaagtttcgttgccgatagtgacctgccctgccccttcaacgacgtggtagatagtgctgtcggtgctccgcgccacacgcgaggcaaagccttttggcagcagttgcaggaacgcgcccatcgacggcatcggataaccgccggtgacgggattaacgtaacgcagcttgtagccttcccactcatccggatcgcccatacgggtcagatcgtgcaacgcctcgcgactgcggtcgtaacggtagttgaaaatcggcgacgagttcccgcgctggtggcgcagcggcagcatattcgctgcatagcgcggcagataatcgccctcttttcgcgtcaccggctgctgatcttcgggatagtcttccgcaaaaccacagcccaggagattgactaacggcagatccagaccatccagccataccaccggctctgatcccggattaccatgatcgtgccagcgccactgcggcgtcaggataaaatcgccggtatgcattggcgtgcgctcgccgtccaccgcggtaaatgcgcctttaccttcgacgataaaacgcagcgccgactggttatggcgatgactcggcgcgacttcgccgggcaggatcagctgtaaaccagcgtataaggtcgccgtgatcgacgactgaccgcgcaatgccggattttccagcaccagcacccggcggatcgcctctttcgcgccaatgacattgccgctttccatcagtagcggacgaatttcctgataattccagtaggccggcgcgcagttggcgtttggcgtctgcggtaccaggtgatgtaacgattcccacagcggcgtcagattctgcccggaaatatgctggtaatactgctgacggctatcttttacgttctgatttatttcagacatggagattctccttattcgtttacgacgctggcacgcggcaggtcgtcaggtacagaaatcgaaaggcggacaaccactgtcagcagggtaagcattaccgcgctgatagccgccggaatagcaatgacaaaaaacaacgtatcgaaagagaaattgagggccatcatcatgccgccggagagcgaaccgacaatcgccccgcagcgtccaatggcgttcgaccagctcacgcccgtcgcccgactttgggtggggtacagcgtcgccgtcagagcattcagcccgacctgggaaccgctaataccgatgccggtaccaaaaatcgccagcgccatcagccaaaggccgttttcgctcaggcctatcatgacaatgcaaactgcgcccagcgcatagctcaccgccagtacccggaacgggttaagccggtccatcaacacgccgagtaacagcgcgccaagcgtgccgccaacctggaatgcggcagtcacccacgacgcctgttgcagatcaatacctcgatggttaagtaacgtcggcatccagctggaaagcagatagataatgagcaggctcataaagaacaccacccataacatcagggtaatgacaagctgtcgcccggcaaaaagctggcgaatactgcctttggcgacggctgccgtctcatgcagaaagaattgcgtatcgtgatagcgctcgccggtaatggcgctgaccgtccgggcgacaacggcttgcggtagttggcgacgtacctgccagcggggagattccggcagcgcgaacagcaggccgaaaaacagcatcaaaggcaagatgccgcctagcgccagaattccgtgccagccaatcagcggcaccagttgcgcgctcacaatcccgcccatcgccgaccccagggtaaaaccgcagaacatcagcgtgaccagcgctccgcgtcgacgagcgggaaggtattccgacgtcatggtgatggtattcggcatcgctccgcccagtcccagaccggttaagaagcgcagcaacaccagggtttctatatccggcgagaaagcggaaagcaggctcaatgcgccgaatagcgccacgcaaagctcaatgacccgcttgcggccaaagcgatccgccagcggcccgcatagcagcgcgccggccgtaagccccagcagccctgcgccaaacagcggcgcaagttcgctggcgcttagctgccagtgggtacgaatatccggggcgatgaagccaatcgcggcggtgtcgaaaccgtcgagcataaccaccagaaaacagcagatgataacgcgccactgcattttgccgacgggcgcggcatcaataagggcttgtagatcacgtcgttgagtcatagctaatgcctcagtgcagggagatagatgttgtttttatgtttgctatgttacgagtttgtagagtgagcgataaaatgtacaatggcttttcaggcagagacataacctggaggttatagcgaatggcgaactgggcgcagaaattgaaattacatcacctgcaaacgctggttgcgctgggcgaacagggcaacctgacgcacgtcgcccggatgatgaatatctcccagccggcgctatcgaagtggctatctcaactcgaagatgagataggcatcacgctttttgagcgccacagtaaaggactacgcccctcggaaggcggtaaattactgctccagcacgcccagcgcctaattaacgatctggagcgttcacagtatgaaatcgcccgtttcaagcagggcggcctggttggcagcctgaagatcggctgttcgcccgtggcgactgactgcgtatcacaggcgattctgagcctgcttaacgaaatgccgacgctgcatctgaatattgaagagaaggtaatgacgccgctgctgcacgatttgcttgccggtcaggtggatgtggtggtagggcgtgtcggcggccgcgccctgcaactgccgcttaattatcaggtactttataccgagccggtctgctttgtggcgcgtccgcaccatccgctggccgcgcgagcgcagatcgcctggagcgatctggcgcactggcggtggatagtctggccaaccggcacccctattcgcatcagtattgataacgccctcgtcgataatggcgtcatgctcccggaaaacaccattgaatcggcgtcaatgaacgtcagcaccaatttgctgcaaagcagcgatatgatctctattctttctttacggctggcgcaacgctatgccagccaggggcaactggcgattttaaacttgccaaaaattgagcaaaaaggcagcgtagggatgttctggcgtaagaatgagacgccgtctttggccctgagtcgctttttgtattttttagcccaggtttagcgccgccgaccaggggcattgcccgatgttcctgctgtctatacccactatgctaagaattcatgatgtgatcggtagcacgttttaacgtttaattgtatgatgaatccatctcatcaagggctttaaacatgagtaagtcactgaatattatctggcaatatatacgcgcttttgtattgatttatgcctgtttgtacgcaggcatttttcttgcatcactgcttcctatcactattcccggcagcattatcgggatgttaattctgtttgtattgctggcgctgcaaattctgccggcaaagtgggttaaccccggctgttatgtgctgattcgttatatggcgttgctgtttgtgccaattggcgttggggtcatgcaatattttgacttactgcgcgcgcaattcggcccggtggtggtctcttgcgctatcagtacgctggtcgtttttgtggtcgtaagctggagttcacatctgatacacggtgagcgtaaagtggttgggcagaagggaacgaaaaaatgatgacatatatctggtggtcgttaccgctgacgctggcggtatttttcgccgcccgccgactggcggcgcattttaaaatgccgttgctgaatccgctgctggtggcaatggtagtcattattccttttctgttgctgaccggtattccctacgagcactacttcaaaggcagcgaagtacttaacgatctgctgcaaccggcggtagtggcactggcctatcccctttatgaacaattgcaccagattcgcgcgcgttggaaatccattattagcatctgttttgtcggcagtctggtagcgatgattaccgggacatccgttgccttgctgatgggcgcaacgcctgaaatcgcggcatcggtactgcctaaatccgtgactacgcctatcgcgatggcggtgggcggcagcatcggcggcatccccgcgatcagcgcggtatgcgtaatttttgtcggtattctgggcgcggtgtttggccacacgctgttaaacgcgatgcacatccgtactaaggccgcacgcgggctggcaatggggaccgcctcacatgcgctcggtactgcgcgctgtgccgagctggattaccaggaaggcgcgtttagctccctggcgctggtgatctgcggcattattacctcgctggtagcgccctttttgtttccgctcattctggcggtaatgcgctaacgacgggacaaaagaccgggttaaaatttgcgatacgtcgcgcatttttcattgaagtttcacaagttgcataagcaatgagatttagatcacatattaagacatagcaggcccgtaaactacggttccattacattgttatgaggcaacgccatgcatccacgttttcaaactgcttttgcccagcttgcggataatttgcaatcagcgctggcccctatcctggcggaccaccattttcccgccatgctgaccgcagagcaggtctcgacgcttaaaaatacggcgggactggacgaagacgcgctggctttcgcactgttacctctggcggcggcctgcgcccgtaccgatttgtcccattttaacgtcggcgcgattgcgcgcggcgttagcggcaactggtatttcggcgcgaatatggagttcctgggcgccaccatgcaacaaactgtgcatgctgaacaaagcgcgattagccacgcctggctacgcggcgaaaaagggctcgccgccgtcaccgttaactacacgccttgcggccactgtcgccagtttatgaacgagctgaacagcggtctggatctgcgcattcatctgccgggccgcgcgccgcatacgttacgcgattatctgcctgacgctttcgggccaaaagatctggagatcaaaacgctgctgatggacgagcaggatcatggctttacgttaacgggcgatacgctaacgcaagcggcgattacggcagccaataagagccatatgccttatagccactcaccgagcggcgtggcgctggaatgtaaagatggccgtattttcaccggcagctatgcggaaaacgccgcctttaaccctacgcttcccccgctgcaaggcgcgctaaacctgctgagtctcaatggctatgactatgcggatattcagcgcgcgattctggcggaaaaaggcgatgcagcattaattcaatgggatgccaccgccgcaacgctgaaagcgttaggttgccataatattgaccgcgtgcttctcggctaagcaaatgtgccggatagcgacgcactggcgtcttatccggcctgactctcctcttccgcgacccgatacaagggaaatcatgctgaaaatctccgcaatcagacggcggtttcttgcgctacgtcttcgggtacagtagcctgatcgtactttcatcctggtatcgagtttcctgcatgttaaagcgcgtgttttacagcctgttggtcctggtaggcttgctgctgttgacggtgcttggcctcgatcggtggatgagctggaaaacagcgccctatatctatgacgagctacaggatctcccctaccgccaggttggcgtcgtgttagggacagccaaatactatcgcaagggtgtcattaatcagtactatcgttatcgtatccagggcgcgttaaacgcttacaatagcggtaaagtcaattacctgctgctcagcggcgacaatgccctgcaaagctataacgaaccgatgaccatgcgcaaagaccttatcgcggcgggcgtcgatcctgcggacattgtgcttgattacgctggcttccgtacgcttgactccattgtgcgtacccgcaaagtgtttgataccaacgactttattatcatcactcagcgcttccactgcgaacgcgccttgtttattgcgttgcatatgggcattcaggcgcagtgttacgcggtaccttcacccaaaaatatgctgacagtgcgcctgcgcgaatttggcgcccgctttagtgcgctggcggatctctatatttttaaacgcgaaccgcgttttttaggcccgctggtacctattcccacgcagcatcaggtgccgaatgacgcccaggggtatccggccgttacgccggaacaattgcttgaactggaaaagaaaaaagggaaatgatcatggatgtacagacgatatttgtcatattagcctttctgctactcccgcttttttgcttccgtgaggcctggaaaggctggcgaaccggcgcggtagataaagttgtcaaaaatgcgcgaaaaccggtttatgtctatcgccatgccgatcccgtacaatattggtcttatctttttctttataccggttgcggttttttatttactggaatgattatttatcttcttttttatcgttaatctatttattatccctttaaaattgagaatagttattattatgatataaggaacaaatgctgttttgcattctggtttcatttttttgtgaattctttcacagaatacccttctttcaatgcttaggctggcggtagattttagatcattaaaacgcgttatttgcgtttcgccttaatttattcaagcattaaggaagattatatgccgcaacaaaattatctggatgaactcacgcctggttttacgccattactggcaataaaagaggcttcacgttgtttattatgtcacgatgcgccctgtagtcaggcttgcccggcgcaaaccgatccggggaaatttattcgttctatttactttcgcaattttaaaggcgcagcggaaactatccgggaaaataatgcgcttggcgccgtctgcgccagagtctgtccgacggaaaaattatgccagcgcggatgtacacgttccgggatagataaacctattgatattgcacgcctgcaacgttttattaccgattttgaacagcagactgccatgcagatttatcagcccgggagtaaaacacgcgggaaagtcgcgattattggcgcgggtccggcaggtttgcaggcaagcgtgacgctcacgcatttaggctatgacgtcaccatttacgaaaaacagccgcagcccggcggatggctgcgtcacggcatcccggcatttcgtctgccgcaaagcgtactcgatcaggaaattgcccgcattgtagaaatgggcgtcaatattaaatgtaattgtgaggtgggcgggtcgctatcgcttgcgcaactcaaagccgaatatcgcgccgtgctgatgaccgtcgggatgtcctgtggctctggtttaccgttatttgagcaagccagtcacgtagagattgccgttgattttttacagcgcgcccgtcaggccgacggcgatattagcgttccgcgtagcgcattaattattggcggcggcgacgtagcgatggatgtcgccagtacgttaaaaattctcggctgcccttccgtcacctgcgtggcgcgggaagaattagccgaattccccgccagcgaaaaagaatttaccagcacgcaggcattaggcgtatcgattattgatggctttacgcctgtcgccgtcagcggaaataaagtgaccttccaccatgtacgccactcaggagaactgacgctggaagcggaaaatattattttggccgtggggcagcacgcgcgactggatacctttgcggagataaaagcgcagcataatattatcgacacgcataattatcaaaccgacgacccggcgatctttgccgctggcgatattgttaaaggtgataagaccgtcgtttatgcggtaaaaaccggaaaagaagccgctcaggctattcatcattatttagaggaggcctgctcatgttaacaaaagatttgtctgttaccttttgcggcgttaagtttcccaatccgttttgtctttcttcttctccggtaggcaattgttatgagatgtgcgccaaagcctatgataccggctggggcgggatcgtttttaaaaccattggtttttttattgccaacgaagtctctccacgttttgatcacctgacgaaagaagataccggttttattggcttcaaaaacatggagcaaattgctgagcatccgctggaagagaatctggccgccattcgacggctaaaacaggattatccggataaggtgctgattgcttccatcatgggagaaaatgaacagcagtggcaggaactggcgcgtctggttgaagaagccggcgcggatatgattgagtgtaacttctcttgcccgcagatgacctcgcacgccatgggaagcgatgtagggcaaagcccggaactggttgaaaaatactgccgcgccgtaaaacgcggttcatctttgccaatgctggcgaaaatgacgccgaatattggcgatatgtgcgaagtcgcgctggccgccaaacgcggcggagccgacggtatcgccaccatcaacaccgtgaaatccattactaacatcgacctgaaccgcaaaatcgggatgccggtggttaacggtaaatccagtatctccggttattcaggaaaagcggtgaaacccattgcgctgcgttttatccagcagttgcgaatgcaccctgaactgcgcgatttcccgattagcggtatcggcggcattgaaacctgggaagacgctgccgaatttctgctgctgggcgcggcgaccctacaggtgacgacaggcattatgcaatacggttatcgcattgtagaagatatggcgagcggcctcagccactatctggccgatcagggatttgcctcattacaggagatgatcgggctggcgaatggcaatattatcccggcggaagacctggatcgcagctatatcgtctatccgcggattaatcaggagaaatgcgtcggctgcggacgttgctatatctcctgctatgacggcggtcatcaggcgatggagtgggatgaacacagccgcacgccgcattgcaatacggaaaaatgcgtcggttgtctgctgtgcggtcatgtctgcccggtcgcctgtattgatttaggcgaggtcaaatttaaaaaaggcgaaaaagagcacgcgttaacactgtagctctcggtatgaagcccggcgcgcagtttcgctgcgccgggttatctgataagcaaggcaataggtctggataactacttcttacgcgcgtatttcagcgagtccagcgccacggcgaaaatgataatgccgcctttgataatgtactgccagtacgggtttaccccgatataggtcaggccgtagttgatgacggtaaagataatgacgccggtcaccacgccgaagaccgtacccactccgccgctaaacgatacgcccccgaccacgcacgcggcaatcgcatccagttcatacataaagccgaggttgttggtggcagaaccaatacgccctgcttccagtaagccgccgaaggcataaaacacgccggagagcgcataaatcatcagcaggttcagcgccacgtttacgccagaaactttcgccgcttccgggttgccgccaatagcaaaaatgtttttaccaaaacgggtcttattccacagcacccagacaaacgctaccgcaatcagagcgtaaaaggtgatgtatgagagccggaaactgcccatcgccacaaagccctgtgcaaaggtggaaaagccgctgtcaaagccggaaatgggcgaagcgccgacaaagtcatagtaaagggagttgatcccataaacgataatcatcgtgccaagcgtggtaataaacggcgtcacgttcaggtaagcaatgatgatgccgttcaccaagccaatcaccgcgccaatcgcgcagacaatcaggatgaccagcgcaatcggcatggtcgccatttccggaaacactttattggcgttttccattgattgcagtaatgttgccgccacgaccgccgccagccctacctgacgccccgccgacagatctgtcccctgggtgacgatgagtcccgccacgcccagcgcgataataatacgtaccgaagattgcgtcagaatattacttaaattcagcaaacttaaaaaagtcgggtcctggaaaataataatcgccagcaacactaaaagaacgacgtaaattccgccctctttcagccaggtcaaaaagcttttcttgtttaacgcactcataaggagcccctgatcttaaaggtgcaaagaagcaagacgcaaaatttcgttttgcgttgttgttttagtatcgacaatgccggaaacgagaccgttactcatcaccaggatacgatcggtaatccctaacagctccggcatttcagaagagataatgatgatccccttgccttttttcgccagttccgcaataagctgataaatttcaaattttgcgccgacatcaatgccgcgggtcggttcgtccagcattaatatttccggctgcgttaatagccagcgaccaatgatcaccttttgctgattgccgccggaaagcgaaccaatttgcgtgcgatgccccggcgtttttacccgcatggaatcaatgacccattgggtgtcgcttttcatccgggaattatccagtaaccccactttatttttataattacggatattcgaaattaatgagttaaatccgatatccagataggcgtaaattccggtggaacgacgctcttccgtcaccagcgcaaaaccgtggttaatcgcttcgttcgcagtgtgattattaattttcttgccatgtaaagtgattgtcccggacgacttctcacgaatgccaaacagcgtttcgacgatatcggtacgctttgccccaaccagaccggcaatgcccagaatttcgcccttgtgcaaatcaaaggagacatcgcgaatggaaggctgacgcagcgaggtcaggtgacggacctccagaatcacgtcgcccggcttattttctttatccgggaaacgctggttcagggaacgcccgaccatcatcgcaatgatcttatccatatccagcccttccagcggctgggtggcaatccactgaccgtcgcgcaaaatagtaatttcatcgcacaattgaaaaatttcttccattttatgcgagatataaacaataccgcagccgcgttctttcagcttgcgaataatcgtgaacagatgattaacctctttctcagttaacgatgaggtcggttcatccataataacgatcttagcgttataggaaaacgccttcgcaatttcgatcatctgcatttgcgaaacggataacgttcctacgcgcgcgcgtgggtcaatatcgatatccagttcatcaaatatcgctttggtatcctggtacattttatcctggtcgacaaacatacctttggtgggataacgtcccagccacatgttatccatgaccgaacgttgtaataccaggtttaactcctggtgtaccatcgaaatcccattctccagcgcttctttcgccgaatggaagtccacttcttttccctgaaatacaatgctgccggaatctttttggtaaataccgaaaagacattttaataatgttgatttgcctgcgccgttttcgcccattaatgcatgaatagagtgcggacgaacgtttaagttgacattatcaagcgctttcacgccgggaaatgatttgttaatgccacgcatttccaacaaatattcacccgacggcggagaaatcgtgctgcccataatgataccctgtcggcctttttaattatgactatccgcgccggatggcaaaagaaatacgttatccggtctgcggcgcgtcacccttccacggtttcagggcgcaacaaaattgcgcccacagacggaaaagttatttttgggtaaattcgctcagattgtctttgtccacgccgacataaggcacgcgcacgattttgttctcaatcttccagctggtgccgtcagccgcgcccttgccttcggcgaggtttttcgccagatcgaatgtcgctttcgcctgattgttggcgtcattcagtaccgtaccggccatcgcgcccgatttcaccagcgccagggcttccggtaacgcatcgacgccaaagaccggaatcgacgatttattatgcgctttcagcgcctctaccgcgcccatcgccatcgcatcgttattcgcgataaccacttcaatcttgttagcgttcgggccagacagccaggcatccatcttatcttttgcctgcgcggtatcccacatagcggtgtctaacgccagttgctcggtctgaatacctttatcatttaactctttcaccacatacgtcgtacgggcttcagcatccgggtgccccggctcgcctttcagcagaacatactgaattttaccgtctttattcagatcccaaccctgattcgcctgccagtgtttggcaatcaagtcgccctgaatcacaccggattctttagagtcagtcccgacataatacgccttgtcatagctgtccagcgctttgcgggaaggctctttgttaaagaacaccaccggcacattttgcccgcgcgctttctcaatcaccgtaccggcggctgccgggtcgaccaggttaatcgccagagctttaacccctttcgccaataaaacgtcaatttgatcattctgtttggactgatcgttttgcgagtcattcatcagtagctgaacatccggcgcggatttgccatctttttcaatagccttacgcaccacggacataaagttatcgtcatatttataaatcgtcacgccaatacgagtatcagccgcgtgcgcgtgcgcgccgaataacagacttgccatcacggcagaaagggtcagtaccttcttattcatggtagctccggttttattatgtagggtatagcgtaaaaaaatgcccggctgttcagcacgttaacgcgtgttactgaacgccgaagcgtatttagagcctatcccaccaggcgttattggcgcagccagtttggacacggacagcgcgcaaaaaccggagcgtacacgtagtacgtgaggtttgactcgctacgctcgcccttcgggccgccgctagcggcgttcaaaacgctaacgcgttttggcgagcactgcccaggtccaaaatggcaagtaaaatagccctaatgggataagctcttattcaactctttatttttgtccggtagtcgcgggatattgtgataacggtttttataagcgaaataccccagcaaaactgacaactaactgttacacgttagttacagtgcgacaaacgttgtcatcatagctatcacaatgttaataaactgtgaatttactcacagattgaaaacggttacatgcggtgcgtaatcagttagtgatcagtaccgcattctgtcgccatgccaccgaatggcgccgtaccagggtcggcataaagcagtgcgtcgccgtgatatccagcgtgcctgcggccccctgtaacgccagctcggtcgcgattttcgccatagaagcaataggatagcgcacggtagtcaactgaggatcggtataacgagcaatagggatatcatcgaaaccgatgacagacagatgcaagggaatggcgatgccgttatcttttaacgccgtcagcgcgcccgccgccatgttatcgttataggcaaataccgccgtcagttgcagattgcgtcccagcaactcaaccattgccgactcgccgccctgcatgtccggcgtgccggtgcctatccagctctccgacgcagcaatcccctgctcttgcagcgcgtgtaaccacccttctctgcgcatcgcgtcatcttcaatacggtggctggaggccaggtagccgatgcgttgatgtccattattcagcaacattcgggtcgccattctggcgccgctcacattgtcgagacaaacacaacgatgcgcataacccggcacgatacggttaatcagcaccataccggggatctgatccataaagtcgctcagctcgcgatcggttaaggcttttgagtgaacaatcaatgcgttacaacgctgacggatcaagacttcaatcgcatggcgctctttttccgcctcatgataactgttgccaatgagaacatatttctggtgctgctgcgcgaccagatctacggctttcaccagagcgccgaaaaaggcatcggaaacatccataaccacgacgccgatggtgtcgctcacctgagtggccagcgcttgcgcattcgcatttggccgatatcccagcagggtgacggcctgcataacggcgtcacgggtgtcgggactgaccaacgcgctgttattcagtacgcgggaaacggtcgctacagacacgccagcctggcgcgctacatcacgaatggtgatcatattcactgccctgtttgagttcaaaaatgctcacaaatgccccgttagcaggcggctattttgtcagcaccctgcccagggctgcgtgagaaacatcacagggatggaaacggttacagccattttgttaatgaatgtgatccagatcgttatctgagcgatcctgacgcgcgcaacgtgagttgacgccataaccactcgaccggtccctgtcgccagaaacgtagccagatgacggaaaagagaaggtttattgcccataccggaacgacaaagaacaagagttccagtcgattgaatttcataaataagccaaactgataaaacagcgtggtacagatgatcgtctgcagcagataattggtcagcgccattcgccctacgcaggcaatggcaagcgtcagtctgcatcggctaagctgcggccagaagccaaacatcagcgcggcatagcccagcgtttgcaacggcgcgctcagttcgcgcggcgcctgcaataagaaggcgcaccagcggtacgcccagtccagccgccattgtaagatgaccgcaggcaggttgatcattagccctaacgccaccagcagagccccggtacggcgatagtgccgcagactgtactgacctttcagccagccgctacgcattagcgcagcgcccagcagcatcatacccgccagttgccagccatactgcgcgccgagcgccagtaaactattcgacagcatctctgcccggttgctgatagcctccatgccgccattcagcttccagtatttttcatacaatattgccgacgcatccggcgtccaggcgcggctggtttcgctactcgataccacgcccagcagcagtagcacgccaatcccgaccagataaaggagtatgccggtattgaacaggctttttaccgaaggcgcatcgcgtatcagtcgccagcaaattaacccgaccagaccgtaggccagcagaatgtcgccgtcccaaaagaataacgcatggataaaacctaacagtaccaatagcgttaagcgcgactgaatccactgtttaccacgcggaagcagcatttgtagccccgcgccaaacaacaacgcgaacagcgtaagaaacttagcctgcgccacaatatcgagaatcgcccaggaccaggcgtcttcgggaacgatcgcgccgtaccaggcgggattgagataagccgccttcggcaatccaaaggcgctaatgttaagaagcaggataccgaggatagcgacgccacgtacaaaatccagcgtgacattacgctccatcgtctccaccttaatcatggatgatggcgaacggcacgcagaaactcctggcgcgtattctggctggacttaaacaatccgcccagcgacgtcgtcgtcgtggcgctggttgcgtcacgaataccgcgcgctttcacgcagtaatgcaccgcatcaatcgataccgctacattattggtgccgagcaaggtttgcagcgccgtcagaatttgttgggtcaaacgttcctgaacctgcggacgctgggcgaagaattgcacgatgcggttaattttcgacaggccgatcacggaatctttggggatatacgcgacggtcgctttgccatcaatggtcacgaagtgatgttcacaggtgctggtcagcgtgatatcgcggacggtgaccatttcatccaccttcattttattttcaatgagggtaattttcgggaaattggcatagtcgaggccggcgaaaatctcgtcaacgtacatcttagcgatacgatgcggcgtttccatcagactgtcatcgctcaaatcgagattcagcaactgcataatctcagtcatatgccctgcgataaggctttttcgcgtttcattatccagttcatccataggcgggcgcagcggcgtttccagcccccgggcaaccagcgcgtcatgaaccagggccgcttctttactgagtgatggcattaatcgtgttctcctgcaggtgtggcgcctctgccctgcatggggcaaagtttgtcaatattgtgacagtgtgattattgtgcgtgaggtagcgcacataatccagtattcacgcccataattgttgaaattgtcgctgcctttcatgacatctgttccggtgcgaaaatgatggcaggacaaagggcatatttgttaacgcaacgttatttaaatgatgaagcatgtttatgtattacggaagtgaaagttactcacaacgcggtgaataatctgtattatgaagaatctgcataccttatcaggttcactataaaaggagcccccgcatggaaatgctcgaagagcaccgatgttttggcggctggcagcagcgctggcgtcatcatgccgccacgctaaactgcgccatgacattcagcatttttcttccgccgactcaggataatgaaccgcctccggtactgtactggttgtctgggttgacctgcaatgatgagaactttaccaccaaagcaggcgcgcagcgtatcgcagcagaactgggcattgtattggtgatgccggataccagtccacgcggtgaacaggtcgccgacgatagcggatacgatttaggccacggcgccgggttttatctcaatgccacacagccgccctgggccagccattatcgcatgtacgattacctgcgcgatgagcttccggcgcttatccagacacagtttaacgtcagcgaccgttgcgccatcagcgggcactcgatgggcggccacggcgcattaatcatggcgctgaaaaatccgggcaaatacaccagcgtctctgcttttgcgcctatcgtcaaccccagccgcgtgccgtggggaatcaaagcgcttaccgcttatctcggcgaagatgaatcagcctggactgagtgggatagctgcgaattaatgctggccagccagccgcaggacgccattcctgtgctcatcgatcagggcgacagcgatcaattcctcgccgatcagcttcagcccgccgtactggcggaagccgcgcggcaaaccgcctggccgatgacgctaagaatccagcctggctacgatcatagctattattttattgcgtccttcattgaggaccatctgcgctttcatgcccggtatttacgggacgagcgtgagacgtcaccaacataatgaattttccagcgccgcgctgtaattcacctcctccgactgcggcgcggaagatttattatttaaatccgcggcctgctggcgtacctgaaggcggccgctgccctctccgccttcataactttcgtgaaaattacgcagctcggattcaaacagcaccgcatcaagattatgcaacttatccagcgcccgcaggagagaaattaacgtatcaagattgagccctcctcccttctcgatacgcttgatggtggcaatgccaacgtgcgcgcgatcggcaagctgctgctgggtcatcgaaagagacagacgcgtctcctttaagcgggcgcacaacgacaggataatctcatcgttattcatcgtattgtatttcacgctgttaccctctcttgcgcggctgaattttccccagcgaaccatgatacgtttcacggtatttagcgctcatgtctttaccggtctcgtacatcgcagcaatgatctcatcgagcgaaatacagggttcgcttacgcgactcatcgccatcgtcgccgcgtttatcgctttcacggcagagatagcatttctctctatgcagggaatttgtacctgtccgcccagcggatcgcaggtcaatcccagatgatgttccatggcaatttcagcggcgctcagcgtttgctccacggatgcgcccattagttcagccaggcccgccgccgccattgagcacgccacgccgatttccccctgacagccaacttcagatcccagaatagaggcgttttgtttaaacaacatcgcgatagcggcggcggtcaggaagaaacgggtcagagcaccgggctccagcggcgtgacaaatttatcataccagcaaagcgctgccggaatgatgccgcacgcaccattggttggcgcggtaacaatctgtccgccgctggcattttcttcgcttaccgcaatcgcgaaggcattgacccagttcagcgcggttaaaaaatcgctggcggagcgattagcctgtaacgtcttatgtaacgcgcaggcgcgccgcggtacctgataggggccgggtaataccccctcagtatgcaggccgcgataaaccgcctgctgcatcacgtcccatatttgcgccagataattctgcaacgtctgtggcgagtggcggcacagctcatttttcatcatcagcgccgccacggacaggccgttacgccgacacagcgccagcaactgcgcggcatgactaaattcaaagggcgacactgtacgcaaaggaagcgatggcgtcagcggctcgccatgtttgcgaacctgtccggcgccggtcgaaaaccaggtctcttcatacaccgtgaaataatcatctctggcgcgaaacgtcatggcataaggatggcctggatgcgcctggtgattggcgataatcttgacttttatcgtgattccgcccgcgtcggagagcgggagttcgattttgttttcattttccgcacgcttaatcaccgccatatacgaacggagatcgacattctccggctggcaacccagcagcccaagataaagggcggtatccacattgtggcacttgcggcttaacgataacgcgccatacagctcgatttcaatttcccgaattagcggtaacgtctcttgttctctgagcaatgaaataaagtgacaggcggcgcgcatcggccctacggtacgtgagctggatggacctattactattttgaatatatcaaggcaactctccatcgttatatcaatcctttcagtgtcattcgcgttcagtaataaataacatcctcgcacagttggcatatcaaaagtgataccttttgtgtctgaactttacctggtatcaaaaacaacgcttttttagcccttttctggctgtgatatctgtgatagcacgagattccacgccgcaaaagagccattataatacccgtaaattaagggagttatcatatgagcattatttattttattactacacaggatatcgatacgtttcagaaaaaattacaggaaacgttatttaatgccgtcaccatgccgtttccgctattatttgataaacgttatgccgcgcttatcaataccgcttatttaaagcttacgctgccagcggaatgtctgacgcctgaattttatcgctatttacgcgaactctcattgcaatggcagtttgatttttttattaagccgcagccactgcctgctaacggtattatcgcgtttgatatggactcgacatttattgcggaagaaggcgtggatgaaattgcccgcgagcttggcatgtcgacgcaaatcaccgccattacccaacaggcgatggagggcaagcttgattttaacgccagttttacccgacgtatcggaatgttgaaaggcacaccgaaagcagtgctgaacgccgtatgcgatcgcatgaccctttcgccaggcctgttaactattctgccagtcatcaaggccaaaggatttaaaaccgcgattatctccgggggactggatatattcacccagcgtctaaaagaacggtatcaactggattatgccttttcgaatacggttgaaatacgcgataacgttctgacggataacattaccttgccgattatgaacgccgcaaacaaaaaacagacgctggttgacctggctgcccggttaaatattgccacggagaatattattgcctgcggtgatggcgccaacgatctgccgatgttagaacatgctggcaccggtattgcctggaaagcgaagccggttgtacggaaaaaaatccaccatcagattaattatcacggtttcgaattgcttctttttcttattgaagatgaattataacgcgactcacctcgccggaagggaattttaaaatgagtataaaaacatttattttcagccagcccgataagccgattgtaaaagagaaaaaagagatagaccagacctataaaaaatttcgttttgagattatcgcctcggtctttatctcttatgccgtcttttatcttacccgtaaaaacttctccgccgcgatgccggccatgctgacggaaacgtcgctgaccgcagaagacttcgccattatgtcttctattttttacattctttatggcgcgatgaagtttgtcggcgggatgctggtcgataaaattaacccgaaagccatgaccggcccggtgctgattggcgtggggattgtaaatattctgttcggcttttccgacagcgtggcggcattctacgtgctgtacagtctcaacgcgatattacagggcaccagctttccgccgatggcgaaaattatggcctcgtggttttcgaaaaacgaacggggacgctggtgggctatcgttgaagcggcgcacaatatcggcggcagcctcgcgccgctgctgaccagttttgctatcgcctttagcggtagctggaaaatgggattttatgttcccggcgccatttcgctgctgatggggatagtggcgctatttaccattaaagatcgtcccggtacgttaggtttgcccaacgtggggcagtggcgtaacgacccgacggaactggcccaggtcaaggccagcccggtcaacctgagcttctggcagatttttgtgaaatatatcctgaccaatccactggtatggatcattattatcggtgatatgtcggtttatattgcgcgcactatccttaacgactggccgcagatttactattcgcaggttcacggctggagcctgataaaagcgaactcgattatttcctggtttgaggcgggcggactggcaggtgggttgctggcaggctacttgtctgactttatgttcaaaagtaaccgctggatgaccggattaatcttcgcgttagcgctgtgcatatgcatcgtgctggtgccgctggttcaggatacctcttacaccctcaccgcgattctgttcaccatcatgggcttcgccttatacggaccgcatatgctttttgccgtcggctgtctggatgtgacccataaggatgcggcgggatcgattaccggctttcggggattgttcagctatgtcggcgcggcaatggccggtgtgccggtaattatggtgaaaaatagctgggcgtggtcgggcgtttatatctatgcggtgatcgccattctgctaacgactctgtcgctggcgctgctctccaggctgcatcggttataacattctggcgacagcggcaaaacgcggctgtcgccagtctctgtcagaaacggtaatccaccgccataaagtaacgacgtccgtcttcggtataaccgtagtcgtcgcgtttgagatctttatcgcccacgttcagaacgcccgcacgcagtttaacgtttttcgtcgcctgccatgccgcgccggtatcccagaccacgtacccgcccggcgttttcgctgttgcgctgtcggcccgcttacgcccggtataattccctgatacgtagaatgaccagtcttcgagctgcaccggtttccagtccagcgtaccgttcgcggtgtggaacggcagatcggaaagcggcttgttcccgccattactgacgtcgcgcccgtcgttataggtgtaattcaacgacagtttccacgcctcgttaaacggaactttcaactcggtttccacgccctgaatacgcgctttattcacgttgtaataacggaagaccggaacgcgctgtccccgactgttggtttcgaaaccgacaaagttggaatagccgggcgcggcgttaacgtcaggggtacggctaatgctgatgcgattgtccacatcgttacggaacgtggtaacgctcgcttccacgccctccagtatgccttcttcgccccggtaataaaggccgagctcccagctttcactggtttcaggtttcagatccgggctaccgacaatgcggcatccgccacggcaggagttggtcgcccagtccgggcttaattgcaatagcgacggcgctttaaaggccgtggcccacccacctttcaccgtcagggtatccgttgcgttatagaccagataagcacgcgggctccagtgatcgccataggtttcatggtcatccatacgaataccggtggtcagcgccagcggttcgaagatgcgccactcatcttcaaggaacagagcgtactggctggcggaggttttagtactggaaccgccggtcaggttcaccgcatcgctcagtttatcgtgacgccattcgccgccgaaggtgaggaactggttgacagacgctaacggcagaacgtatttcccgtcaatcgaattgctttctgacgtgatagggctactgttgccggggtttttgttttccactttttcgccgtagaatttgagctcactattgccgagatcccaacgtccgttatggctcaacgcatagttttgccgttccagacggtttttatccagcgagtctgagtcccggtcctggcgatcaaaaccgtagcctgcggtaacgtcatgattttcgtttggtgtccaggcaaactcgacgtttccatcccggctggtaaatccttcaatgcgcggcgtttcacccgtagcggtggtggcggaactctgctgctcgtctttttcgcgtttcgccaggctaccgtaggctttcattcccagcacgccgtcgatcagcggaccgctggtaaagaactgaccgttataagtatcgccacggtcgcgatgttcctgaatagtggagtcaaccgtgacgctgccgtgccatttctgaccaatttttttggtgataatgttgaccacgccgcccagcgcatcggagccatacagcgaggacatggggccacgcaccacttcaatacgttcgatagcgtcaaccggtatccagttcagatcaaaatcattatggcggaagaccgcgttacgggagttaacgcgcttaccgtcgatcaggatcagcgtataactgctgtccagaccacgaatactcacgcctttacggttatccccttcgttagtgagctgtacgcccggcacctctttcaggacatctttcaggttttgcacgggcctgcgctgtaaatcttgctgggtaatgacgctgatacttgctggcgcatctttcagattttgttcgatggcggacgcggtaacgaccatggtttcaccatcatccgttgccgcggcaaccggccaggccaacgtaactgcggacatacaaagccctacccgaacgaaagggttaaacctaaacattccatttctccatgaggtaaatacgacaaaaaaaatcggttatcgctcacaacgcattacgtttcgcctgcgataacggttatcacggcgaactctttttatgcaggcgagtcgggctcatgagtgacggtcgcgcccgaatcttcatcctttctgatttcgagcgtaacgataaagcaaacgataataattatcaatttaattgttaataattatgtcatttgaaccaatcatgaagaaaaaacaaaaaaccctctcgaatgagagggttagaagagtcaggttcaggcagtcagtgccggatagcggcataaagcctatccggcctatgacgagaataccgcgttactttttaacgcgttccgggaagtgcatttcgctatagcgcacgaaatgcgtaccttttatcagcttgtagccgaaccagataagcaggaacagcggaataccgatataggtcgccgcgacgccgccccagtcgatggtatctttcaggaacgcttcatagttctgccccaacgtaataatcaggcacagtacaaaggcgaaaatcggccccagcgggaagaacccggaacggtacggcaaatcattcacatcatacccttgtaacacgtaaccgcgacggaagcgataatggctaatggcaatccccagccaggcgatgaagcccgtcataccggaggtgtttaacagccacagatagaccgtctggttgccaaacattgaggtcaaaaagcaaagaccggcaatcacggtggtggcataaagcgcattgcgcggtacgccgccgcgggacaatttcgcaaaaatacgcggggccttaccgtcacaggccagggtgtagagcatacgggtcgaggcatacatcccggagttacccgcagacagtaccgccgtcaggataaccgcattcattatcgccgccgcagacaacaagcccgcatgctggaacactaaggtaaacggactgacgctaatgtctttgacgtcgttacgcagcaggtttggatcggtataaggaatgatcaggctgataatcaaaatcgcgaaaacataaaacagcagaatacgccagaacacctgacgcaccgcgcgtggaatattcttctccgggttttcagattccccggcggcaataccaatcagctcagttccctggaaagagaagcccacgatcatcgcgacgccaatcattgccgcaaaaccgccagcgaaaggcgcatcgcccgtcgtccagttgctccagccgaccggctcgacacctttaaaaatgccgataatcatcgctacgccaacgatgatgaagataataacggtcgcgactttaattaacgagaaccagtactccgcctcgccaaaaccgcgtacagaaatgtagttcagcaagaaaatgacacagaggaatagcgcgctccagatccagcccggcgtgtccgggaaccaccagcccatcaccaattgcgcggcaaccaggtcaacagcgatagtcaccgcccagttgtaccagtagttccagcccagcgcgaaaccaaagccttcttccacatagttctgaccatatgtcgcaaacgagccagatactggcatataggccgccagctcgccaagactggtcatcaggaagtagaccatcaaaccaatcagaatataagaaaacagcgcgccgcctggccccgcctgagaaattgtcgcaccagatgcaacgaaaagacctgtcccgatggagccgccaatggcaatcatcgtcaggtgacgcgcctttaattcgcgacgtagcgcgggcgcttctgtggttttagttttggaacccatgtgaaaatgctatccatccaaaaaatgaggcgcgattgtaacagacgaaatactatccttccgacacaaatgcgcggttataagagaccttcatgaccggccacggattataagtaaagcagagaataacgtatacgtaagcggatactaaaaatggcgatgccgcccgggcagccctcctcttcacctttattcacagtaactcaaaaaacgctgcaacgcgttagaaagatgtttctgccgatgatgaacacgccacaacgtgcgcaccaggcgcggtaacggcaccgcgacttcgcccagggttcccgcctggagttgttcagcaatcacccggcgcgataaacaacttatccccagtccatgacgcaccgcatgtttgatcgcttctgaattccccaactccatcgccatatgaaagcgcggcaaatgcgacaacagcaaataatcgacaatttcccgcgtaccggaaccgcgctcgcgtaaaatccatggggatgccgcaagctgttccagcgtcaccggcccctgcgtcagcggcgaggacggcgcggcaaagaccaccagctcatcttccagccacggctcagagataatctctgtactgtgacatggtccttcaatcaggccgatatcaacccgaaaatccagcaccgcgttaatcacgtcctggctgtttcccacgctgagttccagcggcaaggccggataatgctggcgatagcgggcaatcatagcgggtaaaatgtaattgccgatggtgctactggcataaacccgtatcgcgccgttatcttcacgaaatagctgctcaatttctatcgcttgctccagcaatgccagcgcgcgcgggtataacaagcgcccatgttcgttgaccaccagccgtttccccacccgatcaaacaactgtacgccgagctgaccttccagatcggtgagcgcggcgctaacggcggactgcgataatgacagcatgaccgacgcctgggttgttgaaccgcttttcagtacttcagcaaacacttcaagttgtcgtagcgtaatatgcatagtcgtatcccaccgatagcgtttcacttaccacttataaagattaattataaatatataatcaattttatttttaaaccagatcaccgtaaccttattgtccatatacaggagaaggttatgacagaactcaccttgcagaatcattgtcgtacaatgtggcattttataccggggctcgctctgagcgccgtcattacaggagtcgccctgtggggcggcgctatccctgccgttgcaggcgcggggttcagcgccctgaccctggctatcctgctgggtatggttatcgggaataccatctatccacaaatatggaaacaatgcgacggcggcgtgctgtttgcaaaacaacatctgctgcgtttagggattatcctttacggcttccgccttaccttttcacaaatcgccgacgtgggcattagcggcattgtgattgacgtattaacgctttccagcacgttcatgctggcctgcttcttaggccaaaaagtctttggtctggacaggcacaccagctggctgattggcgccggtagcagtatctgcggcgcggcggcggtactggcgacagaaccggtggtaaaagcggaagccagtaaggttactgtagccgtcgcgactgtcgttattttcggcaccatcgctattttcctttacccggcaatgtatccgctgctggcgcactggttcagcccggaaacttacggcatctatatcggctcaaccatgcatgaagtcgcgcaagtggtcgcagcgggtcatgccgttagcccggatgcggaaaatgcggcagttatcgctaagatgctgcgtgtcatgatgctggcgccgttcctgatcattctggcggcacgcgttaaacagctttcaccggcgaccggcgcggaaaaaagcaaaattaccattccgtggtttgctattttcttcatcgtagtggcgatcttcaactctttccacctgctgccgaaagccgtggtggatatgctggtgacgctggacacggtgctgctggcgatggcgatggcggcgttgggtctgaccactcacgttagcgcattgaaaaaagcgggggcgaaaccgctgctgatggcgctggcattattcgcctggctgattattggcggtggcgccattaacgtcctaatccatagccttatcgcataaattattacgtttcacgcctgttaacccgttatcatagcgttcgtaatgaaccgttagcgggtttaacaggagtcttttatgaaatacatcggagcgcacgtcagcgctgctggcggtctggctaacgcccctgcccgcgcggctgaaattggcgcaacggcctttgcgcttttcacaaaaaaccagcgtcagtggcgtgccgccccccttactccccaggtcattgatgactttaaaatcgcctgtgaaaagtatcatttctcggcggcgcaaatccttccccacgatagttacctgattaatctgggccatccggtcagtgaagcgctggaaaaatcacgcgatgcctttctcgatgaaatgcagcgctgtgaacaactcggcttaaccttgcttaattttcatcccggtagccatctgatgcagattgcacaggaggattgcctggcgcggatcgcggaatccatcaatattgccctcgcgcagaccgagggcgttacggcggttatcgaaaatacagccggtcagggcagtaatctggggtttgagtttgaacagttagccgccatcatcgacggcgtggaagataagtcgcgcgttggcgtctgtatcgatacctgccatgcctttgccgccggatacgatctgcgtacgccagaggcgtgcgaaaaaacattcgccgaattcgggaaaattgtcggatttcagtatttgcgcggaatgcacctgaacgacgccaaaagcgccttcggtagccgcgttgaccgccatcacagtctgggtgaaggcaatatcggccacgatgcgtttcgttggattatgcaggatgggcgttttgacggtattccgctgatactggagaccatcaatcctgatatctgggcggaagagattgcgtggttaaaagcccagcaaattgccgaagcgatggcctgacgctcaatgttcttcaggcaataaaaaaggcagagcgcgctctgccttttttagcgtgtttctcttatgccgcttttgccgtgacttccgtctccggacgtttcaggacggcataagccagccctgccaccagcgtaccggccacaattgccagcaggtatcccaataccggcgtaattgcgcctgggataagcagaacaaacagaccgccatgcggcgccatcaattttgcgcctaccgccatagaaatggccccggtcaacgcgccgccaacgatacagcacggcagtacacgcatcgggtcgcgtgccgcaaacggaatagcgccttcagtgataaagcacagccccagcaccaacgccgctttaccgccttcctgctgcgctttgtcgaacttacggcgcgccaccatcgtcgccagacccagcgctaacggcggtaccatacctgcggccatgatcgccgccatcggcgcgtaagtttgcgtactcagcagaccaacaccaaacgcatacgccgctttgttcaccgggccacccatgtcggtacacatcatcccgccgagaatcgcgcccagcagcaccgcgtttaccgtccccatggtttgcagccagtgggtgagcccttccagaatcccggcaaccggtttaccgatcaggtaaatcatcgccagccccaccaccagactggaaattaacgggatgatcaggattggcttcagcgcttccatactttgcggaagtttcagtttggtactgataagcttcgccatatacccggcaaggaagccggcaatgatcccgccgataaaaccggaaccggtgctaaccgccagcataccgccaatcagacctggcgtaaggcctgggcgatccgcgatggagaaagcgatatagcccgccagtaccggcaccatcagcgcaaacgccgaaccgccgccaatctgcatcagcgccgccgccagcgtgtccggcaccttaaaggcttcaataccaaaggcgaaggaaagcgcaatacacagtcccccggcaaccaccataggcagcatgtaagaaacgcccgtcaacagatgccggtatgcgccagcgctctctttcttcccttcggtcgccgcttgcgatgccttacccgccggttgatacggcgtcgcttccgctacggctttatccagctcctgcgccgtctttttcagcgccaggccggtcgacgtgcggtacatcgggagaccggcaaacttcgccagatccacttcgatatccgccgccacaatcactaaatccgcttccgccacctcttccggggtgatggcattgccggcccccacggagccgcgcgtttcgacttttacccaccagccgcgttttttcgcttccgtttcaatggcttcagccgccataaaagtatgggcgacgccggtcgggcaggccgttaccgcgaccacgcgtttcggaccgccgctcgccgcaggaacagccgcagcaggggcgctgtaaggggtcgcatggcttttggcttcactcagaaacagttccggatgcgcgacggcgcgaccaatatcccccagccaaacctttttgccgttcagagcattgtcgttcggcagagattcgcccagcacgatcgccagctcagcatcattcggattgtcgataatttccagatttgctttatgcgccgccgctccaagcagggttttcgccatgtaagcgcgagcctggccgagattagcgtcaattatcagcagcgttttcattatgcctctcctgctgtcagttaaacggttgtaagtcgacacgcgccatcattgcggccaactgaggacgatcggtaatacccacattgctctggctgaccgccagcgcggcaaccgccgtcgccagacgcagcgtatgttcgctggactcgcgcatcagcaggccgtaaatcaatccgccaaccatggaatcgcctgcgccgacggtacttaccacgtcaaccgccggtggtttagcgatccattctcctgaggcgttaacccacagcgcgccttccgcccccagcgaaatcaccacatgggcgataccctgttcgcgtaacgcgtgcgccgcatcaatcacatctttcatttccgggagcttacgacccgcccaaatttccagttcgcggcgattcggtttcaccagccacggcgcagctttaagaccggcgactaacgcttcacggctactatcaaagataatgcatggacactggctgcgcagacgcgtcatccagtcggtgaacgcttccggactcacgccagccggtaagctaccgctgacgcagaccatatcgaactgacccagccagctcagggagtcgttaacaaagcgttcccagtctgcgggagtcacgtcaaagccggaaaagttgaagtcggtcacttcgccatctttttccgtcagcttcacgttgatgcgggtccggccctgaaccacctgaaagcggttagcgatacccagttcgctgaacaattgctgaaaaccgtcctggttatctttaccgagaaaaccgccgacggtgacgtcgatgcctaagtctttcagcactttggcaacgttaatgcctttgcccgccgcgtgcagacccgtggttttcaccaggttcacttcgccgcgttcgatttcagggcaaaacccaaccagatcgtaagccggattaagggtaatggtggcaacacgcctgctcattatgcgccctccccgagaccggcggcgatcgcatcgccaatcgctttcagcgcctgttcagcatcttcaccctgcgcggtaaagcgcagacgatggcctttcttcacgcctaacgccaccactttcatcagactacgtccgtttgccggtttgccggttccatcaaggtttgtcacggtaatttcactgttaaattgtttaatcgtattcaccagcatggtgcccggacgggcatggagaccatgctcattacgcactacaaattccgcgctcagtacgtcatccgtcagcgcatcatcactggtcagcaacgccagcagcgtcgcggcgtcagcgctcagcagacgatcggctttattgttcagcaacaggtcgccgaggcgttttagcacggcaatcggctgctcatcgttcatcgcgacagtgactaataaggctgctttttcaccctctacgtcaaacgcctgggtcgcacggcttaccgcaacagcgctgcgcaaattgccttccgcgctgtcgttcagccagatgccttgtcccagattcatcggactatcgttaatcgtttttgcgacgaacgccgcatcaaccgctcccgcctctttcagacgcgccgcatttagcgcctgcaatgtgaccagcgagctggcgatgacatccagcgtcatcgtctcgttatcaagttttaattgttcactttgcttctcgcccatcagcaatgcgcgcagctcttccgccgttgtcgcggatttcagctgttcagccacggagtcatcgcttagcacatgcgtcagctgacgcagcaggccgaggtgttcgtccgaactggcggcaataccaatcgccacgtaggcgacctggccttctccccaggtaacgccctgcgggaattgaaagacctggacgccggttttcagcacctgatcgcgcgtgtctgttgtgccatggggaatcgcaataccattgccaagaaaggtcgaggtttgctgttcgcgcgccagcataccgtcaacatagccgcccgccacattccccgcctgcgctaacgcggcggcgatttgccgaatggcctcttctttatttccggcctgctcgcccggatgaatgtcctgaaccgataactggaacatgtgtctcctctcctgctgaattgaaacgattcagccgctatgagaaaaaaagcgccaatctgagttatcaaaaaaaccagatcgcgctgaaacgtttcaagaagtctggatctttctgcttcagcacgcaagaaaagttaccggttttgtagcaattttttgaggtgaagcacattttttctccaacagaccctcaatagctgacgcataaaaggcttcagcttttttctttcagcttgcgtcagcacgccctggtaacaaactggaatgctattttgatttttcgtgtcgattttgattcagacgcctgtttattttctgacgggcagcgtaaactccgcctctcttcacaccactgatatagaaacatgcacaacagtcccgccgccgctgcgcctaaatcgtttgacctgacgtctaccgcctttttgatcgtcgcttttctcaccggtattgccggtgcgttacagacgccgacgctcagtatttttctgacggatgaggttcacgcccgtcccggcatggtgggtttcttttttaccggcagcgcggttatcggcattatcgtgagccagtttctggcgggtcgctcagataaaaaaggcgatcgcaaaaaactgatcgttttctgttgcgtgctgggcatgttggcctgcgtgttgtttgcctggaaccgcaactactttattttgctgttcatcggcgtctttctcagtagcttcggctctaccgccaacccgcagatgtttgcgctcgcccgtgaacatgccgatcgtacaggtcgtgaagcggtgatgttcagctcaatcctccgcgcccaggtctcattggcctgggtcattgggccgccgctggcctatgcgctggcgatgggttttagctttacggtgatgtatttgagcgcggcggtagcttttatcgtctgcggcgtcatggtgtggttctttttaccgtcaatgcgcaaagatgcgccgctggcaaccggcacgctggaagcaccgcgtcgtaatcgccgcgatacgctgttgctgtttgtcatctgtacgttaatgtggggaactaacagcctgtatatcattaatatgccgctgtttatcatcaatgagctgcatcttccggaaaaacttgcaggcgtgatgatgggcaccgccgccgggctggagattcccacaatgctgattgcaggttacttcgccaaacggttgggaaaacgcctgttaatgtgcatcgccgttgtcgccggactgtgcttttatgtgggtatgttgctggcgcacgcaccggcgacgttgctcggcttgcagttgctgaacgcgatttacatcggcattcttggcgggattggcatgctctattttcaggatctcatgccaggccaggcgggttcagccaccacgctgtataccaataccattcgcgtcggctggatcattgccggttcgctggcgggaatcgccgcagaaatctggaattaccatgcggtcttctggtttgcgttagtcatgattgtcgccaccatgttctgcctggcgcgtattaaagatgtttaacttgcaagcctgatacttttactcttcgacacatttcagcgcagagtttatctctgcgcaatgttcatgcgcggtcattcattgtctttttctcaatacgatattctgttagcgccctcttacataagagaccggttattgagaaaattacgcccatcagtccgcaaagaaccaacaccagccgcatcttatattttggtgtgacagcaacatctatcacttcaatgttagcattatttttaaccgcctccgacaacaaggatagctttgcatatgtttccgtttgtaacatatttttatgcacgctataacgtttaatgtcaccatcatcgatataccatgccgccattttatcgacactatttttcagggtggaaataatattattgacgctttcttccctcccctgcgccttaaaaagaacaagctgatttttcgcgtcaaaacttattttatttttatattccgcaggcaagaaacggctaaactggttaaggataaccgttgttttacattgaatatcattagtatagccacataacgcataggtagcaggcgtatccagattaggtttgattgtcatactcacaacctttgtatcatgctgcacgctcacaaaaacatagccaatggcaacaaaaataaaggtagcgatcatgatacttagccattttcttataaggaataaggaaacgtcgactaaatcaatttcactattttctccccgcatttcacatcccttttaaaacgctaatagtcaacccgaatactgaaataacaaaaagcaacaccagcgtaaaaataaacgccctggctgcgaacgtatatttcttcataagataaaacccacacataagaattcgagtattttaaaggaaaataacaatacattcacactggttatatcgatcggtaaatacatcaatgatagatataaactatcaaattcatgatatcgatcgttataaataattaaaatcgatcaaaattcctctttttaatagataaaaactatcatataaataaaattgatcgtttttgttttatgtgacggttcattcggtacacgttcaggcaccaacggggttgagcggcgacatctaccgcttcagaagccacgaaataagggaatcatgtattacgctatttaatggtaaaaggaggtaatttgaggcgcagcttttgcagactatttcgggatataacgtaagcccctgcacgtttatcaaaaacggcatagctcatggtaaggttttctgttcgagttccagcaaataaataatggcctcttcccgggtcgttaaacacatgtcccctgtcggttgcaaaccagagcacacttttgggcgtaaaggcgagccaaagataaggcacaagttatcttccgaaagctgcacgcatctggtattcatcggcttgccatacggcattccgggtatcggcgacgaaattgaaggcgcaatacagcaagcgccacaaccgctacgacagtccatgctcagccctctatttataaccaaatgaaagataacagaatttgtccaaagaaaaatccagatttaaaatgtggacgtcatcatgatcagacctgccctcagacattccgaagacaaggctggaaacagaagggacaacacagcacacttcccccctccgggcgacatgccatcgcgtattctcgttgaacgcggggcggaaagcgggcgaacagtatcaccttttttgcaccagcaaaagtgacaattccacttgcctggatggcccggcgcgagtagttttacgcgatattttagataatctctacaacaggatctcctcgatgccaagagcgaacgaaatcaaaaaaggtatggtactgaactacaacggcaaattgctgattgtgaaagatatcgacattcagtcgcctaccgcccgtggcgccgccacactgtataaaatgcgtttttccgatgtccgcaccggtctgaaagtggaagaacgtttcaaaggcgacgatatcgttgataccgtcaccctgagccgtcgcggcgttgacttttcttatgtcgatggcaacgaatatgtgttcatggataaagaagactatacgccgtataccttcaccaaagatcagattgaagaagagttgctgtttatgcctgaaggcggaatgccggatatgcaggttctgacctgggacggccaactgctggcgctagagcttccgcagaccgtggatctggaaatcgtcgaaaccgcgccgggtattaaaggagcgtccgccagcgcacgtaacaaacccgcgacattaagcaccggtctggtgattcaggttcccgaatacctgagcgcaggtgagaaaatccgcattcatatcgaagagcgccgttatatggggcgcgcggattaagtttcacatttttcggctgcgccccagggcgcagtctgccccttttatttattgactgttctgcaccaggcaagagaaacgttaaaaatttaacattttctgctcttaagatggcagcagcacgacttcgtcaactcagcacttctctttttcacgtttattcgccaggattattaaaagttgttatgttgtatcaatatcctggagctgacgtgaccaaaaccaatcttattactggatttctcggtagcggaaaaaccacctctatccttcatttattagctcataaagatccggctgaaaagtgggccgtcctggttaatgaatttggtgaagtgggtattgacggcgcgctgcttgccgacagcggcgcactgctaaaagagatccccggcggctgcatgtgctgcgtcaatggattgcctatgcaggtggggctcaacacgctgctgcgccagggcaaacctgaccggttgctgattgaaccaaccggactggggcacccaaaacagattctggatttattaactgcgccggtttatgagccgtggattgatttacgcgccacgctctgcatccttgaccctcgtctgctactggaccaacagagtgtcgccaatgaaaatttccgcgatcagctcgcctcagccgatattatcatcgccaataagaccgatcgcgccacggcgcagagcgatgccgccctgcaacagtggtggcgacagtacggcggcgatcgtcaactgattcatgccgaacatggacagatagacggtaagcttctggatttaccgcgacaaaatctggcggaactgccggccagcgccgcgcattctcacactcatgccagtaaaaaaggactcgccgcgctaaatctgcccgcccagcagcgctggcgacgcagcctcaatagcggacaaggtcatcaggcctgcggctggattttcgatgccgataccgtgtttgacaccattggcctcctcgaatgggcgcgtctggcgccggtgggccgggtgaaaggcgttatgcgcatacaagaggggctggtacgcatcaatcgccagggcgatgacctgcacatcgaaacacagagtgtcgcgccgccggacagccgggttgaacttatctcaaacacagaaaccgactggaatacgttacagacggccttgttgaagcttcgtttagcgacgcacgcgtaaggttgccaccgtttaaaaactatggcgaaatgacgatgaaaacccgctattccttgataattctgcttaatgccgccggtctggcgctgtttttgtcatggtatcttcccgtcaatcacggcttctggttcaccattgattccggcatattccacttctttaaccagaaactggtggaaagccacgcgttcctctggtgggtcgctattaccaataatcgggcgtttgacggctgttcgctgctggcgatgggcggactgatgctcagtttctggctaaaagaaaacgcatcgggccggcggcgcattgtgataatcggattggtcatgctactaacagcggtggtgcttaaccaactcggtcaggcgctgatccccgtcaagcgcgccagcccaacgctctcttttgagcatatttatcgcgtcagcgagttgctgcacatcccgacaaaagacgcgtcaaaagacagtttcccaggcgatcacggtatgatgctgctgatattttccgcctttatgctgcgttatttcggcaaaactgcggggattatcgcccttattatatttgtggttttcgcgtttccgcgcgttatgattggcgctcactggttcaccgatattgtggtcgggtcgctcacggttattttgattggcctcccctggtggctgatgaccccgctcagcgaccgggcgatagcgctttttgagaattatctcccgggcggaaataaacaaattttaaacaaataacctatgtaattaacattaccttcagcgatagttttacatcgttgaaggtaatttatgatgatattcccccagcccatcatttttcggtcatattattcctctgcaaaatgaacagtttgcccgatttttaaacgatttgcgcttaatttgacccgtgctgatagttcactttttgtatcataaattcttataaaaaatcacgcgaaatcgctcgcaatgacagcaacaatcgggtaatctcaaactcgttttgcctcgccagataattattctcattgcgaataaatttgtgcgttccgccacagatttgtgcacaaagaattgtctcaagctgtgcaggtaattagtctcatcacgtttggcatttttataacgatatttatcgttaaggacttcaagggaaaacaaacaacatggtcaaatctcaaccgattttgagatatattttgcgcgggattcctgcgattgcagttgcggttctgctttctgcttgtagcacaaccaccaataccgcaaagaatatgcattctgagacgcatgctgtgggcaatagcgatagctcttcactgcaagcctctcaggatgaatttgaaaatatggtgcgtaacctcgacgttaagtcgcggattatggatcagtatgctgactggaaaggcgtgcgttaccgcctgggcggcagcactaagaaaggcgtcgactgttccagctttgtacagcgcaccttccgtgaacagtttggtttagagcttccgcgttcaacctatgaacagcaggaaatgggcaaagcggtttcacgcaataacctgcgtacgggcgatctggttctgttccgcgccggctccactggtcgccatgtcggtatttatatcggcaataaccagtttgtccatgcgtctaccagtagcggcgtcattatctccagtatgaacgaaccgtactggaaaaaacgctacaatgaagcgcgtcgagttctgagccgcagttaatcttcatcaggcagcacctcccttggcttacctgatgagacgacataaaaagcactgcttcagcagtgcttttgcttattatcccttctgaacccgttttgccgaatggcgacgtgtggcgtcttatccagcctacaacacacgaacgtaggcctgataaacatagcgccatcaggcattcaggtcgtttcccccaacggctactgcgacaatacgctttcctgcgcatcacagaaaagcatgactatccggggtaatccaggctatagtcttataaatcaaccagtttaaccggcatccgccttttcaggtcacaccaggaattatgctaacacgcgactcctcttccggtcggaaaatcctgcttacctgtatcattacggggatagcggcagcattacttattggtagcctgcaatttttcctgtcgtggcataaacgggatgttaaatacaatacgctcctttctgatgtacaacattacctggccagctatttcgccgacctgaaagccaccaccgatattcttcaaccgttgacgatcaacacctgtcagcaggttggcgcagaactcacctcaagagccgcttttagccttaatgtccgcgccttcttattgattaaagataaaaaagtgttctgctcttccgccactggcgccatgaatatgccgcttcagcaactggtaccggatatagatatccgcaaagacgttgctatggcgattctgcccggcacgccaatgatgcccaacaaaccgacaatggtgatttggtatcgaaacccattattaaatgacagcggcgtattcacatcgctgaatattaacctgacgccctacttactctataccacgcgccaggatgattttaacggcatcgcgctgattgtcggcaataccgctctgtcgaccttttcttcgcgtctactgaccgtcgcggagctgccgggcacgccatcacgactggcaactatcaacggcctgccgcttaaaatacggctttatgccgatagctggacctacaatgacttgtggtatgcgttgatgctgggctgcattagcggcatcgtagcagggtttatctgttactttatctatgccctccggacgcgaccgggcaaagagattttaacggcgatcaaacacgagcagttttatgtggtttatcagcccgtcgtcgatactcgtacgctgagcgtcaccgggcttgaagtcttactgcgctggcgtcaccctacggcaggcgagattccgccggatgcctttatccactatgccgaagcgcagcaacttatcgtaccgttaacgcagcatctgttcgagctgatcgcccgcgacgcacccacgctacagaaggtgatgcccgtcggtgccaaatttggcattaacatcgcgccggaacatctgcacagcgacagttttaaagaggatatgcaccggctcagggacgccctgcccgcgcaccattttcatatcgtgctggaaatcactgaacgcgatatgctccagcagtatgaagcggccaaactgttcgaatggctgcattccgccgggtttgaaatcgctatagatgatttcggtacaggccatagcgccctgatttatctggagcgatttactttagattatctgaaaatcgatcgcggctttatccaggcgatcggcacggaaaccgtcacgtctccggttctggataccgtgctgacgctctccagacgcctgaatatgctgacggtggccgagggcgttgaaacgccggagcaggcccgttggctacgcgatcacggtgttaattacttgcaggggtactggattagtcgtcctttacccctaaaagatttcgtgctgtggatgtcggcgccttctgtgcctgaatggtagcccccttacggttttaacggattcacatcagacgcaacgtcacttattattcagcgaaacgcctgccggtttgcagcgggcaatacgataaggaaaccgccttcagatgattgcgcgcgtaatgcttctgcttgtcgcactggttagcgctggcgcccaggcccaggaaatcaaagaaagctacgctttcgccgtactcggcgaacctaagtatgcttttaactttgagcactttgattatgtgaatcctgctgcgccgaaaggcggtcagatgacgctttccgccattggtacgttcgataatttcaatcgctattcgctgcgcggcaatcccggcgtacgtaccgaagccctttacgatacgctttttaccacctcggatgatgaacccggaagctattacccgctgattgccgaccatgcccgctatgccgccgactattcctgggtggaaatctcgattaatccccgcgctcgttttcacgatggcacgcccattaccgcccgcgatgtggcctttacctttcataagtttatgaccgaaggcgtaccgcagttccgtctggtctataaaggtactaccgtgaaggcgattgcgcctttaaccgtgcgaattgagctggcgaagcctggtaaagaagacatgcttagtctgttttcattaccgatcatgcccgaaaaattctggaaaaatcacaagctcagcgatccgctttcaacgccgcccttagccagcgggccataccggattactcagtggaaaatgggccagtacattgtctattcacgcgtcaaaaactactgggcggctaatctgccggtcaatcgtggacgttttaacctcgacactatccgctacgattactaccttgatgacaatgtcgctttcgaggcgtttaaagcgggcgcatttgatctacggctggaaaacgacgctaaaaactgggcaacgcgctatatcggtaaaaatttcgataatcattacatcattaaagaagaacagaaaaacgagtcggcgcaggacacacgctggctggcctttaatattcagcgcccggtatttaaagaccggcgggtacgtgaagctgtcaccctggccttcgattttgagtggatgaataaagcgctgttctataatgcctggagccgaaccaacagttacttccagaataccgagtacgccgccagaaattaccctgacgccgatgaactggtattactcgcgccgatgaaaaaagatcttcctcctgaagtcttcactcagatctatcagccgccggtctctaacggcgacggctacgatcgcgaaaatcttcttaaagctgacgccttgttgacgcaggccggatgggtgatcaacggacagcaacgggtcaatagcgtcaccggtaagcccctgacgtttgaacttctccttcctgccagcagtaatagccagtgggttctgcccttccagcataatcttcagcgtctgggcattacgatgactatccgtcaggttgataattctcaactcaccaaccggatgcgtagccgcgactatgacatgatgccgaggctatggcgggcgatgccctggcccagctccgatctacaaatctcatgggcgtcggaatacattgactccagttataacgctcccggcgtacaaagcccggtggtggataaactgatcgcgcaaattatcgcagcgcagggtgataaagcgaaactggtgccgctgggacgggcgctggatcgcgtgctgacctggaactattacatgctgccgatgtggtatatggcgcaagacaggctcgcccggtgggataaattctcccatccggcgattcgcccggtatataccatcgggttagatacctggtggtatgatgtcaacaaagccgccaaactaccggcagccaggaggtagtaagaatcaatgggcgcctatcttatccgccgtctgttactggtgatccccacgctatgggccattattaccattaacttttttatcgtgcagatcgctcccggcggccctgtcgatcaggcgattgccgcgattgaatttggccagggcggcgcgttgcccggcgccagcggcgaaggcgttcgcgccagtcatgcgcaaaccggcgtcggcaatatcagcgacagccattatcgcggcggccggggactcgatccggaggtgatcgcggagatcacccatcgctacggcttcgacaaaccgctgcatgagcgttatttcaagatgctacgggactatctctcttttgacttcggcgacagtctgtttcgcagcgcatccgtactaacgctgatcaaagatagccttcccgtctccattaccctgggattatggagcacgctgattatttatctggtgtctatcccgctggggattcgcaaagccgtccataacggcagtcgctttgatgtgtggagcagcgcgtttatcattattggttatgcgatccccgcctttctgttcgctattttattaatcgtcttttttgccggcggcagctactacgatatctttccgctacgtggcctggtctcagccaactttgacacattaccgtggtaccagaaaatcaccgattatttgtggcatattacgctgccggtgttggcgaccgtcatcggcggttttgccgccctgacgatgctgacgaaaaattcgtttctcgacgaggtgcgtaaacagtatgtcgttaccgctcgcgctaaaggcgtgagtgaaaaaaacattctctggaaacatgtttttcgtaacgccatgctgctggtgatcgccgggtttcccgccacttttatcagtatgtttttcaccggctcgctgctaattgaagtcatgttctcgctcaacggcctggggctgctgggttatgaagcaaccgtttcgcgcgactatccggtgatgttcggtacgctttatatctttaccctgattggcttattactgaatatcctgagcgatatcagctatacgctggtcgatccacgcattgattttgagggacgataatgccgcgattaagcccggtcaatcaggcccgctgggcgcgtttccgccataatcgccggggctactggtcactatggattttcctggtcgtgttcagcctgagcttatgcgcggaactgattgctaacgataagccattgctggtgcgctatgaaggccagtggtattttccgctggtaaaaaattacagcgagcgcgatttcggcggcccgctggcgacaacggcggattatcaggacccctggctacaacggcagcttgagaatcggggctgggtgttgtgggcccccgtacgctttagtgccaataccattaattttgccaccacgcagcctttcccctccccgccttcggcgaaaaactggctgggcaccgatgcgaatggcggcgacgttttcgcccgcatcctgtacggcacccgcatttctattttattcggcctgatgttaacgatttgctccagcgtcatgggcgtactggcgggcgcgctacagggctattatggcggcaaagtcgatttatggggacaacgtctcatcgaagtctggtcggggatgccgaccctgtttctgattattttactttccagcgtagtgcagcctaacttctggtggctgctggccataaccgtgctgtttggctggatgagtctggtgggcgtggtgcgcgccgagtttttacggacccgcaattttgactatatccgcgccgcgcaggcgcttggcgtcagcgatcgtgacattatcctgcgccatatgttgcctaatgcgatggtcgctaccctgacatttttaccgttcattttatgtagctccatcaccaccctgacgtcgctggattttctgggattcggtctgccgcttggctccccttctctcggcgaacttcttttacaggggaaaaacaacttacaggctccctggctggggatcgccgcctttctgtctgtcgccattctgctatcgctgctgatttttatcggcgaagcggtacgcgacgcctttgatcctgctaaggcggtataagatgacatctccattgcttgcgattgaaaatttatcggtaggtttccgtcagcaacagcacgtgcgccctgtcgttaacgccatttcgttacaggtgaacgccggggaaacgctggcgctggtcggcgagtcagggtcagggaaaagcgtgacggcgctttccattctgcgtcttttgcctacccctcccgccgtctacctctccggcgatattcgctttcacggcgaatcattgcttcatgccagcgagcagacgttacgcggcgtgcgcggcaataaaatcgccatgatttttcaggaaccgatggtttcacttaacccactgcatacgctggaaaaacagctctatgaagtgctgtcgctccatcggggaatgagtcgggaggcggcaagggcggagatgatcggttgtctggatcgggtcggtatccgccaggcgagccagcgtctgcgcgattatccgcatcagctttccggcggcgaacgccagcgcgtcatgatagccatggcgctgttaacacggccggaattactgatcgccgatgagccgaccaccgccctcgacgtctccgtacaggcgcagatcttatctctactgcgggaactccagcgcgagctcaatatgggattgctgtttatcacccataacctcagcattgtaaaaaaactggcggattcagtggcggtaatgcaacacggcaagtgcgtagagaaccaacgcgccgacacgctgctctccgcgccgacccatccgtacacgcaaaaactactcaacagcgaacccactggcgatccggttccgctccccgccgggcaggcgccgttgctggaagtggacaagctgcgcgtcgccttcccaatccgcaaaggcattctgaagcgcgtcgtggatcataatgtggtggttaacaatatcagtttcaccctgcatccaggcgaaacgctgggtctggtcggcgagtcaggatcgggaaaaagcaccaccggtctggcgctgttacggcttatccgctccgaaggccgcatcgtgtttgacggtcaatcgctggatacgttaaaccgccgccagcttttacctgttcgccaccgtatccaggtcgtattccaggacccgaactcatcgctaaacccgcgtttaaacgtattgcaaattatcgaagaaggcctgcgcgtccaccagcctacgctttcaggcgcgcagcgcgaacagcaggtgaaagcggtcatgatggaagtcggcctggacccggaaacgcggcatcgttaccccgctgagttttccggcggccagcgtcaacgtatcgccgtcgccagggcactgattttaaaaccgtcgcttattattctggatgaaccgacctcatcgctggataaaaccgttcaggcgcagattcttgccctcctgaaatcgctccagcaaaagcaccgtctggcctatatcttcattagccacgatctgcatgtagtacgcgcgctgtgccatcaggttattgtgctgcggcagggggaggtggttgaacaggggcaatgcgagcgcgtgtttaccgcaccgcaacaggcctatacgcgtcagctactcgcgttaagctgacgcctaaaaaggattattgttagaaaaaggttccgctatcgccacgccgaaatttttcagccgacaggtggcggcaaactcatcctgacgattaacgaacaggcacggctccccttcgcactccagcacggagcaaggaacttcaatatcgcttagcgcctggctgagcttatgcatcactgaccacgcgctatcgcctgccggactcaacagtttaagcgccaccagactattctcggtgctctgcccgttttgcggaatcggttcaacctttgaccccgcaaaacccgccgaccagcgatagttttgcggcagacggtgaacaattgagagctgtaatgtattcactttctttccccggaagcacaattacttcacaatttacttacatttatattaacacatcattgacaacccgtccttaaacagattgctaacgcccttctctccgtcagtggctctacagcaagcgggagttaaaatagttttaccgacacggagatagcggcgggctatatgtacccgtttctgcgatctaactcaacctttttaactacaatgatgtgactttttacataaatggattttacataaaataaacataaaggaggaaaatgatgaattggtaattgatatacatcaactatgaaagccgtttggctttgccatcgtgtagcggatagcatcccccaacgccgcctgcgcattcttcggcgccattgagggacagcgcgcccgtcaccgttttttgggacggctggcgtagagataaaacagaatggaacaggcggcgcaaagcgcaatcgaccagatcatcggccacgcactgttaaaggtagccagcgacagcaacgcgccgacgatagcgccaataccaaagcggaaagtgcccgccaacgaagacgccgttccggccatatgcggaaactcatccaaaatgaccgccatcgcattggacgaaaccatcgacacacagccgacaaacgccgcaacgccaaccaccagcgcccagaatccaatgcccatcagcgcgctgaaaaccatccacaccgccatcgcaaactgaatccatagcccggcccgaaacatgtttagcgcccctacccgtctgacaaaacggctgttgataatcgtcatcacaaacagaaatacgatgttcaacgcgaagtagtagccgaaatcctgcggcggaacatgattaatttcgatataaacaaacggccccgcgctcaaaaaagagaacataccggcaaaactaaacccgctcgccagcatatagctcagtacgcgtttgtggcgaaacaacgcggcaaagttacctattgtggtacgaatatgaaaaggctgacgccgctcaacgggcagcgtctctttaatcagagcaaagatcatgactgacgccagaatcgccgcaatggccagtatccagaagatatagtgccagcttaaccataccaacacccagccgccgacaatgggcgccattaacggcgctatcgtagtgaccagcatgacaaatgacatcatgcgcgaaaactcttcctttggataaatatcccgcatcagcgcattgatgacgacgcttgccgccgcggccgccaaaccgtgaaagaaacgcatcacgatcagttgatcgatagtctgcgccaacgcacaggcgaccgccgcagcggcaaataccagcgtcccgcccaggatgaccggcttacgcccgaggctatccgccatcggtccatagataagctgacccagcgcaaaccccaaaatataggtgctgagcgtcatctgcgcgctaccggcaggcacgccgaattgcgcagaaatcaccggcagcgctggaagatacatatcaattgacagcggcattaacatggccaacaggccaagaataaagacaatggcaaaggaagagtgctgccgggtggtcacatcgaactcctgaatttaacgagatagttagccgacgctggcgatttcttcttcagtcaacgggcggtactcgccgggagccagattctcatccagcgtaatggcgccaatccgttcgcggtgcagttccacaacgcgattgcctactgcggcaaacatccgcttcacctgatgataacggccttcgctgatggtcagacggacctgcacaggtgttatcacctccagcgtagcgggtttagtgagatctttttcattatgcaactgcacgcctttcgcaaattgcgctgccgtatcgtcggccaccggcgactccagggtcaccagataggttttttcacagtgatggcgcggcgacgtaatgcggtgcgaccactgaccgtcatctgtcattaacaccagaccggtagtatcgatatccagacgtcctgcggcatgcagcttatacgccaccggctcatccaggaaatacagcaccgttggatgatcgggatcatcggttgaacaaacgtatccctgcggcttgttaagcataaaatagcgtggcccgtgttgctgcgctaagggattgccgtcatacgcaaccgcatgttctgggagcagtttgaaggccgcatttttaatgatgtcgccatcgacggtaacgcggttaccacgaatttcacgcccggcaatagcgcggctgacgccaagctgctgagcgataaatttatcaagtcgcatgtgtgtgatttagcctgtaataatacggaaatcgggcattctacccgaaaaaagggaattgctatccgctcagtatagcgggctaactatatccctcaagggaaatgattcatggcatactattcccggaaccgtttaacgtagtgagaccatgatttttacactccgcccctaccagcaagaagccgtagacgccacgctcagccactttcgccgccaccgtacgcccgccgtgattgttctgccgaccggcgcaggtaaaagcctggtgatcgccgaactggcgcgcgtcgcccgcggacgggtactggtgctggcgcatgtgaaagagctggtcgcgcagaaccacgccaaatattgcgcgctggggctggaagcggatattttcgccgccggactcaaacgtaaagagagtcagggcaaagtcgtgttcggcagcgtacagtcggtggcgcgtaatcttgacgccttccaggaggagttttcgctgttgattgtcgatgaatgccaccgcatcggtgacgatgaagacagtcagtatcagcaaatcctcactcacctgagtaaagttaatcctcacttacgtctgcttggactcaccgccacgccttttcgcctcggaaaaggctggatttatcaatttcattatcacggtatggtgcgcggcaacgacaacgctctgtttcgcgactgtatttatgaactgccgctgcgctatatgattaaacacggctatctgacgccgcctgagcggcttgatatgccagtggtccaatacgatttcagccgcctgcaggcccaaagcaatgggctgttcagcgaagccgacctgaaccgcgagctgaaaaagcagcagcggattacgccgcacatcatcagccagattatggaatttgcgcaaacgcgcaaaggcgtgatgattttcgccgccacggtcgaacatgcgaaagagattgtcggtctgcttccggcggacgacgcggcgctgattaccggcgatacgccagggcccgagcgcgacgcgctgattgataatttcaaggcgcagcgttttcgctatctggttaacgtctcggtactgaccaccggctttgacgccccacacgttgatctcatcgcgattctacgtcccacggagtcagttagtctttaccaacaaattgtcgggcgtggtctgcgccttgcgccgggaaagaccgattgcctgattcttgattacgcaggcaacccgcacgacctgtatgccccggaggtcggtagcccgaagggaaaaagcgataacgtccctgtccaggtattttgcccggcctgcggctttgccaacaccttctgggggaaaaccactgccgacggcacgctgattgaacactttggccgtcgctgccagggctggtttgaggatgacgacggccatcgcgagcagtgcgattttcgctttcgcttcaaaaactgcccgcagtgtaatgccgaaaacgatattgccgcccgacgctgccgggaatgtgacgccattctggtcgacccggacgatatgttaaaagcggcgctcaggctcaaggatgcgttagtcctgcgctgtagcggaatgacgatgcagcatgggcaggatgagaaaggcgaatggctgaaaatcacttactatgacgaggacggcgcggatgtcagtgagcgcttccgcttgcacacgcccgcccagcgtaccgctttcgaacagctatttattcgcccgcatacgcgcacgcccggcgttcctttacgctggatcacggcggcggatattgtcgcgcagcaggcgctgttgcggcatcccgattttgtggtcgcgcggatgaaaggccagtactggcaggtgcgtgaaaaagtgttcgactatgaaggccgcttccgccgggcgcacgaattacgtggttaattgtacttttcattgatgtaacggcgatttgagtatagaatcccgcccgcctttgcatacgcaaagcagatcacttacctgttgctgggtcgcctgtagcaggaattattaaagagagatttaaatgtttactatcaacgcagaagtacgtaaagagcagggtaagggtgcgagccgccgcctgcgcgccgctaacaagttcccggcaatcatctacggcggttctgaagccccgattgctatcgaactggaccacgaccaggtgatgaacatgcaagctaaagctgaattctacagcgaagttctgaccctcgttgttgacggtaaagaagtaaaagttaaagctcaggctgtacagcgtcacgcttacaaaccgaagctgactcacatcgacttcgttcgcgcgtaatcgcctggaagttgaagaaaaaccccgccccggcggggtttttttatgcgtttaattgaatttgacgacatgcagagcaacgagaacccactttgcttttctgctttcttacacctcgccacattcaattagcgcctcccctaatcgaggatctgtagtttccgccgcggtattcatacctttaagccgattgaataatgcccgttgacgaacgctggcactttccggtttccatggcaaaattcgtattggtatcgtttgcccatcattcaacgcatcaaataccttttcattggtcagtaagtcgccgcagctccatgtcttgctatcaaactgaaaatcaaataagacatggagttccagttcatctacacgcacttgacgctttgcattatcgatgcgtatttccaccttctctttatgcgtcaaagttgcatcaagattgagtccataccgtttcaactgccccttgtcgtaatagtaacgtatgctggaccaggttgatttaaaagcaaatccagtaatgaataaaccacttaacaagaacagcgggcatatgaacaagctcagtaaccagttggtgccataagtataaaacagtaccaacgagagaacggtgaacaccatgccgagcatcaacatcatcaaaaatgcgacaatgtgcgcatacaaaacctgccgaaataaactgaaattaacaggcggcctctgacgtattcctttactcactacggcgtccttttatgtcgtatgcctttatttcccgcccgacgtgcgtcgctgcaactgatcgcgcaaattcggcggcgtccctttgatagtcagggtatcggtcgccgggtcccagaaaatccgctcgcccagtagcatcgcatcaaagttaatcgttaacccgccgccgctgccggcatatttggttaactggcgtagcgtactgcgatctgccgggaagctctcttccagctcatagcctttttcggcggtaaattcgctgaagctgacttcactgacgccggaaagctctttagacagcgattccagctcaatttcttccccggcttgtaattgctcattgcagtagctgtacacctgctggcgcacgttctgacgttccgctttatccaactgcgcttctgcggtgaaatcatccactgcctgcaacaggccgcgattctgcgctttggcgttcaacccttcgctggcgccgaggaaatccataaagaagtcagcgaccttgcgccctacccgacctttgagaaacgtcagatagcgggtcgattgcggattagtttcccactcggtaagatcgatacgcgccacgatatccgcatggttgatatcaagataatgcgtcgggttaatgtccagattttcattgacccgcatactactcaggttgttcagtaccgtaaccagcagatactccaccgccaggtaacgataatggcagaacaatacaatgccgccgtccgcaaagggatatttcgccagttcgtcacgcaggcgtccggtcgccgcccggctaaaggcaagaaaatcttcttccccctgacgttgcaaccgcagcgcttgcgccagttcactctcttcattaaacaggccatacgccttattcttggcgctatagacccgatgcagttcagccaccatctcgacaacggtggttgtcggctccagcaatgaatcgcgcaagaccagctcaagattttgctcatcgcgcttgataagctggtgcagggcaatctggttgatatccagactcatgataaactctcctttaagaccgggcggtattcaaccaccgcctgccggaagacgcaagcaatcgccctgtcatttcaggcgttatccgtaacgcgaatgatttaggggataaaaatgcagaaaaaaaactgttgctacggtaatatgttgccctttcatgaacaaacagattttgatttatgccacaactctcccgctatagtgatgaacatgttgaacaactgctgagcgaactgctcagtgtactggaaaaacataaggcgccgaccgatctttccctgatggtgctgggaaatatggtcaccaaccttatcaacaccagcgttgcgccggctcaacgccaggcgattgcgaactcttttgcccgcgccttgcagtcttcgattagcgaagacaacgcgcactaaaaagccgactccggagaaacaagcgacaggtatggtaactcatcgtcagcgctaccgtgaaaaagtctcccagatggttagctgggggcactggttcgctctgttcaatatactgttggctacgttgctcggcagccgttacctgtttgtcgccgactggccgacaacgcttgcgggtcgcatatactcctacctgagcattgtcgggcactttagctttctggtgttcgccacctatttgcttattctttttccgctcacgtttatcgtgatgtcccagcggctgatgcggtttttatcagccattctggcgaccgcgggtatgacgttgttgcttatcgacagcgaagtctttacccgtttccacctgcatcttaatcccattgtctgggagctggtcatcaaccctgaccagaacgaaatggcgcgcgactggcagcttatgtttattagcgtgccggttatcttattgattgagatgctatttgcgacatggagttggcaaaagctgcgcagtctcacgcgccgccgccatttcgcaaggccgcttgcggcattctttttcgtctcctttatcgcatcgcatcttatctacatctgggcagacgctaatttttaccggccgattaccatgcagcgggcaaacctgccgctctcttatccgatgacggcgcgacgttttcttgaaaaacacggtctgctggatgcgcaggaatatcagcgccgtctggtagagcaaggcaatccggaagcggtctccgttcagtacccgctcagcaatttgcactatcgcgatatgggcaccggtcagaatgtgctgctcattaccgtagacggcctgaactattctcgctttgagaagcagatgccggagctggctacatttgccgagcaaaacatcgacttcacccgtcatatgagttcagggaataccactgataacggtattttcggcctgttctatggcatatcgccaggctatatggatggcgtgttatccaccagaacgcctgcggcgctcattaccgcgttgaatcagcaaggctaccaactgggactgttttcttcggatggcttcgccagcccgctttatcgtcaggcattactgtccgatttctcgatgccggcagcgcaaacgcagtctgatgcgcaaacggccagccagtggatagactggcttgggcgctacgcacaggaagataaccgctggttctcatggatatcgtttaacggtactaatattgatgacagtaaccagaaaaattttgttaagcgttacgccagtgccgccagcgacgtggatgcgcaaatcaatcgggttctgaacgcgctgcgagaggccggtaaattcgacaatactgtcgtgatcattaccgcaggacgcggcataccgttgacgccggaagaaaatcgcttcgactggtcgcaaggtcatctgcaagtaccgctggtgatccactggccggggacgcctgcgcagcgtattaatgtgcttaccgatcataccgatgtgatgaccacgttgatgcaacgcctgttacatgtcagcacgccagcgaacgaatattcacagggccaggacatctttaccgttccacgtcgtcataactgggtaacggcggcagacggcagtacgctggcaatcacgacgccgcaaatgaccctggtgctcaataataacggtcattatcagacctatgacttacacggcgagaagatcaaagatcagaagccgcagctcagtctgctgctgcaagtgctaacagaagagaaacgttttatcgctaactgattaattataaatcagttagcaccgtttccccttgcattcgcgttggaaagaggtagtattagcacccacaagtcggcacgtagcgcagcctggtagcgcaccgtcatggggtgtcgggggtcggaggttcaaatcctctcgtgccgaccaaaattcctcgaagaaccagcctgttacggctggtttttttatgcctgttttctgaacggggaagcaacggggaataatcggggaaaaaccccgacacaaaacatcgactttaccgtaaagtttcaactattcacatcaccgggcagtcatcaaactccgcgttcctggcatcattaatgatgtacgtgataactccaaatattgcgtgtgaagaattgtagccatcaccatcttctggcagcgcttcctttctcccgttctccagatttatcaggtggggctgagggtgagttcggtatcgcttgatcctgaattccccatctatcgcgcatatcagcagcgagccatcacaggctgaaagcgacgcgtccacaacaagtagcgccccctggattatcccttccctgaaatgtgaacgcgatgcccgcatgaaataagtcgctgcgggctggctgattagctgctgatcgagggagatccttgtttcaacgtaatcactggcaggtgaagggaagcccatggctatagtcctccgtttggattgaacagctgaaaggtacgtctccccttcctgcgttgatacatcgcggaatgttgtcacataccactcgatccattcgttagcctgcttcatcgtccagttccagttaaccttgctcagttgctggacaaaccgctgtgtggtgacggtcttccggccattaggttcctgctgtatcgaagcataccaggctatttcaatattgatggtttgcccggagcaaaagatatcattctgggagaattgactaagagggttcaccggatcttccccgatgctgatgttcgggttaaaccgatgatgacactaccggcgatcaatactgacgccagcaagcatgagaaggaacagataagccgtactgttcaggaaatgtttgaagaggctgaattctggttagtgagcgagtaaagtttttcaatatccgccatagttacgttttgatcgcgctgtggcggattttcattttcgtaaacgttcccttttcccattctcaaaatttacagggtgcgattgcgaatgtgtccggtaccgcttaatcctgaactcctctccatctatgcaaaccagcaatgagtcgtcgcgtggcgaaacggacgtatcaataaccagcaagatgcgctggtcagtgaccttctttgatgtagttgatgtagttgatgtaacaggtcaattttaggtgacgacttttataaaaaagtctatcatccattatcttaatttcgtcttgtgtggcaccttggaattataggtaaaaaatgatctacaagaaattcagactcgatataaatgggctaagagcttttgcattgataagtgttgtgctgtatcacttcggtgtaccttatgtgtcaggtggctttataggtgtagatgttttctttgtaatttctggttttcttatgactggaattgtccttgaacgcgtagaccacaaaggagtacttgatttttatattgcaagattcctaagaattgtaccagctctggtatttgcaattctcttgttgatgattttcggtttatttacactaagtacaaatgaatacgaagcacttagcaagaacgcaatatcgtctttacttttttattcaaataattattacgcaattcactctagttatttcgactcatcatcagagttcaactttttgcttcacacctggtcactatcagttgagtggcaattttatattttatatcctttattagtcattatagttaaaaaattacggtttcctgttggactctcattatctgtaattttagccatgtcacttgcaattacacttatgcgagtgactggaaccaaagaagatattttctatcttatccctaccagggcatgggaaatgctggctggcggccttgtatacatagcatctgtacgttacaaaatgccagaatggataaagcattgtgaggtttatgggatagtcctcattgttgttgctgttgttatactgcacagtaatggttactggccaagctattcagcactcgctcccgtgctgggtgcttcgatggttattctggctaacaaacagaactctttattcacatcaaacagaattgcacagtgggtgggtaagatttcttactcagtttatttatggcactggcctgtaattgtagcgatgaaacattatgatattgagttcagcgctataaatattttctttggtgtaattgtgtcttttgcgcttggggatatttcatacagaacaattgaaaacacgctcaggaaacgagttaagctacaatttaatattgtattattttcctctactctggctctatgcttgtttgtcatgttcacaaaaggtgttagttttagattttcagacaccctaaagcaagtcgttgagtatcgtatggacaactctccctggaggcctgatatttgcttcctcaatccagatcaagattattcagcattctcaaaatgtcaggataaaatgactgaaaagtcttttgttgtatggggtgactcgcatgccgcacatcttatgccagggctgaaatcggtatttggaaattcacttaacattacgcagagaactgcaagcttgtgcccaccaatcattgggcttcaaaaagatgacaggccgtattgcaaagacatcaatgatatggtagccaaggaaatttcagacaacaagcctactacggtattaatgtccgcgttgtggcctgtctatcctatgcgtgattatctgcctgagactattaaattcctgaaggataacaaagtaaaaaacatcatcattgttggcccgttcccggtttggaagaaaacgatgattgatactattgaggatatggggattaattccggaaggaccgttccatggagcatgacggatgaaacccgtaatctgagagataatgacaaatatcttagagagctggcgaaagagcattcccttacttatatttcaccacttgagactatgtgtacagaaagttattgcaaagcaataatagggaatagaattgcttaccctatacaatatgacaatgcgcacctaacaccagaaggctcagggtggtttattgaggaagtgaaaaagcagatttcaaaataaacagaggggcttgcccctctttttattttataaaactacaacaataatgcaaattattttatgtgtatagcttttctgatggggcatgctatattttgtgcaaccgatgtatcaaccgctttcagcgcatcgagataatccagccacagattgtactgcgccagttcgtcgcccgtcaggcgcccgagcgccgctttgcccggccaccgcctgctgttcatgtgctcgttggcctgatcgattctcttcttcttttcctgatttgcggcagaaattaaatcatcttgcgttggaggtggaatacaaacccaggcaatacgtccatttgatgaaccgagatacattccctttggtggagttttcatataatacttatcaacttcttcatcggtcagagcataaaaatcattcgaccacaacccactggccttataagctggaatgttctcctctgaaaaatatgtgtttgatgtcgaggaaaaacatattatgctcatgtcaataccccatgtaaattacagatatggaattatcgccaccggatggattaaatatacgaatagcaccgttgttctcaatcaaatatgttggggatatcgtaatatcaccttgtgcatcctgaggggtaagcgtggcagccttgaatacataaggaaatgttgttggtaatggaaaaacataccctgaagggctattcccgggaacaaagcaatttaaagcctgaaagattgcgccaccgggcagagaggtatagatcccggcagggttgtccctgagaacaaatgaagaaatgtccgggttctgattcgcgccgttgcccacgtcccgttgtgcggccgatttcaattgaacgtttcgagcacatgatttttatctatttattcagatattccggccagttaatatcaggtgcaacatctagcgccagtcggcgcagctttgttcggtattcacgtagcgcagtgagttcggacaattcagcagccgttatatcgccatcgtcctgagcttctacaagctgattgatttttgctgtgaccgacgtcatacgcctgtcgcgctctgccgtagctaaagcaacataatcaatctgaacaggggcaataacgccgttgctgtaggtaaaattcccaggctgaaaaccatcgggaatatcagtatcagcgaattccacaacagagcaattcagcggaaatagcttagtcgcatctttatccgcagcaataatcagccctgttttgtcatactggattttcagcgtatcgggctggaataacttctgtaacacataccagtcaacacctgattcatcctggataaactgaatactgcaattctctgataatttctgctgaacaagggttaattccgttgttttagtgaaatttttaaaatgcctcatttttatgctcccaccgtataccactggccattcactttaagctgtaacaggcgtcgttggatcctgtctggtgtatcgttcgagtctccattctcaacacctgtaatgacgtaacctaactggtctgcaaatccgggcgaacgatataagtttccatgctcaacggcaccgaatcgaattgactgaacatacccactcagcatgtcagttgtagcaaggaatacaccagacccatcatcatgaagcataaatggctttgttttgtcgttctggtacacaccaaccatggtgatgtactgacgcgctggcttagaagccacaaacgcgctcagccagcccggtccgctaccaccgccccatatatcaccgtatacatcgccatttttgttgaatatcgcacttccagcctgcaagttttcagcagctgcgataacaccgagtcgggtgctgatatatgcccggatagccaggtcttctgagttctgaaatccgataccattccatgacttaatgttcagattgttaccattaaaacctgcaccatcaacgtcacctttagccatcccaccagtgccatccccaaccgtaaccagggtatcgccacgcatatttggtgcagaaataccccccgtaaaggcgcccccctccagcatcgccacttgacgccatgaggtaatacccgttcctgttccgtgaccaaacaatacgttattgccactgactgcaagaacatccacaacagtggtcggacttaccacctcgctaagggtaataatttgccagaaacttacctggtctggcgcgtcgggggcctgatgcgcacgcataaactgacagcctgtagccgcacgcgcgccgattgatgttcggtcaattgcgtcactgacaaacgttcccgcgaggaatcgcccgtcacctttaaaaagaacgtctactaaaccaacgttctggagaaacagcggcttattcgggatgtccgcgccattctgatttttttcaagacgggttttaacctgttcatagatcaacctgccaatggcggcgtgaagctgcgtatgttcgcctttactgagtggtatgccggcggcttcaataacagtacagacctcttcctggactgcatcccacatatcactgttgagatccgttgcgcggcggcccgtggcgggatcaccattcgtaaatccgtttttcccctgaccaaatttatctttttgcgcagtgggcgtatcaattctgtgcattctcttttccttccggataagcaaaaacaacaaccgtatgtgacggacaaagcttatcaatcacacattcagcaacagtatcgccccacgttctgatcgcagaatcgcaggtgcttgtacaggtctgccatccagcagacgggaaaaacgggtaatctcacgaatcaccacaccatcctcgtcctggtaccattcctctccgtcgcgggcgacgcgaaatgcaaaagaggactggttgatatccccgcgctgcattggtgccaacaccagatcacggattgtctgagtttctggcgcggtgatgtcataacgcagcccccgctcatcaaccgtcagtgccagcgtgcccgcacttctgcgacccaggataaaattggggtcatggttgaacaacgcccgtacatcgtcattcagcacttcatcaaacgcaccgggccggatgatttcgcgaaacgaaccgaaaatcagttcagaacgactgtcaaagaccgaaccatacccgatgatccggctgggctcgctgtcgtgcgtttctgcgcgcacctcgccgctgtaacagcgaatttcacgttcactcatcttgagtgttctcctagattgtggttttggctggccgggaggcgttgacgctgaccagcatttcatcaaggccgtctttcggattcatgtcctcaaacgcgcgtgcttcgttgcggctcatccatccgacatactcaagagcagatgcaaaggtcagtgtcagagcgccacagagcaaaatctcgagcatttttcgcttccagccgccaccactgccaaaataggcgatgcgcaaaccagccataacaatcgacataatgactgcgcccagcggtgtgtctccacgccaccagctctgtaacaattcaagtaaatcaggccaggtatttgggttatgaggcatttgtagttatctctcacctcgctgatacagcaggtgcaaattgagggaataccacgtaccgcaaatcagaagcggaaacgtaaaagaagccgagccaatcgataactgcgggataggccaggcccaacgaatcccaggcccagaaacgacaaaacccgctcgacggcgggtttaagctgcgtggcaaagtaaccactcttagcagattacaagaatttttgcggaccgcgttaatgatttttaatcccaaagtcgtattatgcgttttttactgtaggagttaacaggcttatattatgttagaaacactatcattcactgaacgtgacgagttccaacgaagaaacatcgctgaaaatatcatcaaattgctaaaaccagaggcagacatttcaccactggtaatagacggtgcatgggggacagggaaatcagaatttagtatcaaactgaagaatctcattatcgagcaagaaactgagtctaaagttgtctatgttgatgcctttaaaggggatcatgcagaatctccattacttctaataacatcagctattgcgagcattttgccggaggaggaaaaacaaaacttcattaagagatctcttcctgcaattcgatttggtttaaaaactgtactaaaagctggtgcaggttggtttttacgacaggaggctagtgaagttgccgaagaattccaagatgcgatgaagaaagcaagcaatgcagcaatagatgggactattgaaaatatacttgaagaccacatggaatcagagaaaaacataaactctctaaaatcttgcattgaagatatatcaaacaagcaaaagatagtgataattattgatgaattagaccgatgtaagccaagtttttcaacaaatatcattgaaacaataaaacacatctttgatatcaataacgtattttttattttagttacaaacactgaacaactaaaagcatctataaatcatatttatggttatagcattaactcacaaaagtatcttgacaagtttataaaatataccattactcttccagacacatgcttaataaatgggcataacgtatgtaaaacctcggttatatattgggatcaccttgtaggtgaaactacattactaaataaaatcaacagcttagttggtagctttatttgtgatttaattcaacgaaccaacttatccttacgtgaaacacaaaccttttcacgcaatcttaacattttccgactgttaaacgacaatgagtgcaaaagcaatgatccttttataaatatgatcgttgtcgtagctgtcttcatacattgttttggtgacaaggaaaaactaaaacaagaaattaccgctgaatctatatcttatttagcagacctgcttaacataaaagaaataccttattcttatgagagaagatcgcaaatccctgaaatatcaattatattcttcggaataattaaagacagcattactcttaatgagcgatttgcccctaaaagtgatgaggaacttaaaaagttcacaaatgtttatactgattatgaacacctaaaattttggagcactactcccagagagttaatgataaaatatattaatcaaatgtcattcatccagtaaataatacgcccctgcatggggcgtattattaaacgtccatatctaatgttagatccagcattgaaaggcagccatcaataaatccttcggctaactgtatttctatacgtaccaatttctcatccttcccacgcacctttgcaatcttacgcttggatattctgtataaataatgtgccacaagaagcgaatgctcatcaggccttttttgctttaaacgagcaagacacccctcaacaattaatgcgtcattatcagaacaagccacacgtgtcttgcaggtatagggaagaagccctttaaacccagcagctataggcgaatagtccactcctgagctatcactcgccgcccatgccccccaacgctcaagaaccatctgaatatcacgcatcaactttctccaccaaatcaggccagcacgccaattgccagcgcgcgatcgataaaacgaaatatcaactccagttgagagccgtatttctcttcgaatgccacggtgtccgcatgtaactcattgtgatgcgttctgcacaacggcagcacaaagaggtcatgcgcctttgttcccatccctccctgaccgtagcctatcaggtggtgcggatcatccgcctgcttcccgcagcaggtgcacggctgggatttaacccagcgggtatatctctcattgacccatcgacggcgtttcggacgtaacatgaagctttccggcgattccggatcaaccctgagcgccagtacctttttcgccttatcctgtacaatgctggtggccagcaccgagggaacaatttcactttcacgggtagctgactggacaattgccttcggcatccttaatgcttttctcgcagcgctctccggtaagacttctgccaggttattgcgtaccatccaccagcacagttccgggagagtaactgcgtgcatatcgtcaaaacccagatcacgacaaacaaccgataaaacccattttgtcgtgttctccacagctattgatttcagccgttccgtaaactgttcgcgcagcaggttatcgcagtgccagcacagtcggattgcccccggagcgtggcgcatggttgtcatctgttcgctgtgccagtctgaatgcggccactgacagccattcccccggagtagccagctttccagactatccagaccaccagcacgatagataaccgactcattacagaacacatcacgaacagcaggatcatccgccagcggctgtgataccgccgggaccgcgccgctggcgaaagatgaaaattgctccggctctggttcaagcagaacacgcccctgcataaacaggggcatcagttccgatcccggcctgaacaatacaacgcccatacgaggagcaatttcaggggtcagtaacgctctcacgatcacctcaatgaacggtatcgagcagcttcagcagctcagggaatttggactcgaagaaatgcggctgcgtctcgcgagggtttgccgggctggtgatgtttttgccgaacatgcagccttttgccgtcagcgaccagaattttttaatgccgttaatcgcggagcgactgtaacgctcacgatgttcaacaacacccagctttgctaactgctgatacgcctgattagccgtcatccggatatttcacctgtacatcatccgtactgtctgatgttgttcgtccgggaatatctttgtcgcaccgcacctcattcacctggtgcatcagttacgacgccactgaacgttcagatagctccccagcatctcctccacaagaggtcgcaggccatccaaaaatgtctttttcgcgctctccatcgctcttgctccgatagtgcgctctgcatcggtattaccgaccagcccagacggtctcagctctgtgtcagacagcatccggtacgtttcctcataatccgatatttgcttttcacgaagcgcgttaacgcgttccggcgctttgcgctccagcactctgtgtaacggcccccactgcagtatccactccctgaactcgcttttttcagcggctttcacctgaagctccgcgtcctgaaggtctgtaaccgtcacgccggatacgtcaaagaaacgcatttctgacgtcacgctggtcagcccgagtgatttcttcagcttattctgatacgccagccagacctcaatttcatcaacgagagccagcgttctgaccttttcccgggcaatctgttccagttttcccagacggaacatctcacgccccgtggcaaccagcgccgcgagatcgttatcgtattgccctttttctgcattatgtaccagctgtacgttcttcatctggtgcaaaaaaaatgtgacccggtcctcgcagcttgaggttgcctctgttgccatagcaaaggtgtttgctcttaacgcctcatcttcagccagttgtgccagccaggacgatatctgtgccttaaaccccgcgtcctttatgaagttttccgtctcactcagtctgtccaggaagaggctgaatgcgtcggcgttatcttcctgtccgaacatatgccatctgtctgcaggagccggttccccctcccgggcaggcaccagccagtcagcggccgccaggtgcagtgcccgagtttcccggggggcggaggctcccgccatatcgaatcgtattatggggcctgaatagccaggcgcgctggtgatctcccgcagcgcctgcaaagtacgttcagacagtgggttcccttccagatttacggttgtctctgaagacagatgaatgagactttccggcaggcgggtcagctggttacgatagaccgacagcgacagtagtcctgacggcagcatcggcaggctggtcagccggttaccagataccatcagctccttcagttctgacggcagcaccggcagactggtcagccggttaccagatacaatcagctccttcagtcctgacggcaacgccggcaggctggtcagccgattattataggcccacagcttatataattctgacggcagcgtcggcaggctggccagttggttatcagataccgacagctcctgtagccctgacggcaacatcggcaggctggtcagctggttattataggcccacagcttacataattctgacggcagcgccggcaggctggccagttggttatcagataccgacagctcctgtagccctggcggcaacaccggcaggctggtcagttgattaccaaagatccacagcttacatagtcctgacggcagcgccggcaggtgggtcagcgggttactaaagatcgacagttccagtagtcctggcggcagcaccggcaggctagtcagctggttaccagagacctccagcgtccgcagttctggcggcagcgccggcaggctggtcagattattatcaggaataaccagtgtggtaatatgcgcgggtaaacagtctggcaaggtggtaagacctgattctcccacgttaagcactgcattgccattattcaggcaggcacgcattttctgtaccactgctgcacggccgcgtgactcttctgcgggtgcagcccttctccacgctgaccagacagcatcatactctgctggcgtctgtggagccgttgtggcagggaggaaggatgtcctgaatgtcccggatgccccttccgcgtgtcctgtgccctcctcaccctgtgctgtgtccagggtgaggcgatgtgtttcactgtacccctggcaatttacggtatagttcccggcatcatcaagggtgactgacaatatctcctgactgtcttcatccagaatacagaagtaattttccccgtgctggccggaatgaatgctttcctcccatccggcatacgcgagcgtcctgagcagttcaaatctgttgatcacatcctcccgcgtcgttccggccggcgggtgacaaatcgtccagatgcactccagcgcttcagtctggtgcgttgagcaaaaaaattccttcattttttcccaggaactcatttcagggggggtatcagaccaggcaatacgataaatgcggcgattactgatggtggcgggaagacatccgcttccaatatgaaagggcataacaaaaaacctttataaatttacatatagtatctgtccggcagacatcatctcttcctggtcttaatttcacaataaggttatcggcggattcatggtcgtcctgacatggcgggcttcagaaggtgcagaagaaaaatccgttatgatgaccggatggcgggactgtcattttacagctaaagtgtcgattttttcagggtcgctttccacgatgaccagatcatccggtatcaacgcccgggcgttcaattttcgattctgcctgcctgcgcagctcttccggcgaataaaccctttgaacgactttaccgtctttaaactgccagcagcatgaatatcagcgcgacggttttcatccgtatcaggcaactctgcaacgctctggccagcaggccacagcccggaaacatcacgcgtaatacacgtaataacatcgttatcgtcgtaggtaattttcagcgtgtctgctgaaaataattgctggcacccataccagtcctgaccatcctctgatttaagatacgccgcatcggcgaataatgtgtcatctggttccggtgcatacggaatgaaatttttaatatttaaaaactgtttgttctttttattttttttccgctgtcataattattccttcttatacacttggggctgtcacccacgtatcaccaaccagatactgaatgggacgttgtcacccgaatagtcatcgcgccacgcactcccattacctcaatcactgcgccagcgagacagatattaccgcagccagtatccgtgatgattttgttataagcgtaagaccaagagccacgacacatccagtaagggtgattgaatgcgccctgagactccagccagacgataaactccgccgtcgtccacggattatcatcacagccgataataactgcgccatcaaacgctcgcgcggcaccgatacgacgcacaaacaaatccttgtccggaatatcgccgccattctgtgatttttgtaatgcatcggcggcacgacttatggtttctcgcaaaccaacgtattcgataagaccgtcaacactttttcctgacagcgccgtcagggtttcgtccagcggctgcttgcccgccagtttattcagtaccgtggtggcaaagttcggatcatttcccaacgcgtcagccagttcctgcagggtgtccagtggctccagtacggaaccaaccagcgcggcaatcagtttgcggacaaactccgcgtttgttgtctgaagccctttagcatcgcctggcggcgtcggtgtggtcggcgttccagtgaatgccgggctgtccagcggcgctttggtccgtacctcacccataacggtttttaccgcctttggtgtggccgccagcgcttcgctgtcactgtccgtggcactgcttaatttaacgataccttttttcgtcaggcttgcatcttccagggaaatcacgtctgcgatatcctcggcccgtttcgcggcctcttcggctcaggttgccaattctccggctgcagctctgctttgcgctgccagtgatgcgctggtatcagatgcggcggcgtgggtggatgcctccgatgctgatgactaggcggctgccgccgttctggctgtgtcagccgacgccgcgctggctgatgcctccccggcttttgtggtcgccgtacctgcgctgctctccgcagatgctgcggatgaagctgccgaccaaaattccccttgaaaaccagcctgtcagggctggtttttttatgcctacaattaaaaagttagctgatgccagagacgttattttgcatgaactgattttgcatgaactgattggacatctttcctgtgcagtggtcacagtaaagtcaatgcaggcaactaacgtaaaccatgtttgtactaaaacagaaaaagcgcatctacaccctatactggaaaaaatgtttgcagtggcaggtaaatgagtaagcaatctgtcgcagcaataataaaacgttctggtaaggtaaacggcctaccacgcctttgtcgctaacaattagcctccctgtcgccatagggtcgataacgatcggctattcacaacacgttttgtagacaacgtacggtgattaattactccttcagccagcaactcgctaattgttattcaacttcagaaattataactaattgaagcacctacaaaattatgccctgaatttttatccgtaagtgatccattcgagaaatgccggatataagcttctgtagaaaaagccccaaagttccagccaagaaacgctttttctccaaaggtaaatgcagaattgacacgcatatcatctcgcgacttagattttatataagcccccagaccaataccggtatagataccagcgaaatgaaccagcgccacatccttcgagatacccaatacgccctggttatatttattacagggaacgctgccagaatgtttactgcaatcatcgctacccttagccttaaatcctcctaactccagattatttcttgcctgtaaaaagaaaaaatcgctgggttcactgtatgtcagaaaagccgtatataagtgctcaacccctcctcttcttatactttctcccgcagcaaaagagatctgatgcttgttgcccttgccaaaaaaaacattatcattagcagaacatgcgaatgcacaaggtaataatagatatataaatattctcttcatatacactccaccaccatttcaatgtcaatagttatttttaaccggctaacatatttaaaattttctacgccacgcttacgctcacagaaacggctgatatagcatccacactacgttctccccttgagtcgccccaacgggtgctcaaaacgccgcgagtgttgttcaggcacatccaggataagttataagtgaatgacactcatttctgaccacattttcatttatgataagaatatcgtcagaatctctttatcgcataaaaatacctctgctattgacttaatatttaatttaacagatgtcgcggtttattcgttctgctcagatgtatttcattgacattaataaaaccataaataaattcagttaaaataatttgttaataatgacaagctttagacgctatgacttttaataagaaatttcctgccagtaaagatagtctggacttacgggtgcaagggcgcagcaacatatgccacacttctgttatgtcacattgtccgaaaaaagcgtccagaccagtattcaacttcagggagtattctgttttctctcacaacgggttgttttatcctttctatcgttcagctaattactcgcctgtcacaggttttactacttacccatgcactaattagggtaaaatttacgcgcttgacaatgtggcaaatctggacgatttccgcgctgaaaacaataatcattctaataaaactcaggagatacagcatgcctgaagtaacaccttttcaggtgcttattgtggacgaccatccacttatgcggcgaggtattcgtcaattactggaactggacccggcttttcatgtcgttgccgaagcgggtgacggggcgagtgcgatcgatctggcgaatcgcattgagcccgatctgatcctgctggatctgaatatgaaaggtctgagcgggttagataccctgaacgcgctacgccgggatggtgtgacggcgcaaattattattcttaccgtctcggattccgccagcgacatctacgcgctgatcgacgccggcgccgacggttatctgctcaaagatagcgatccggaagtgctgctggaggccattcgcaaaggcgctaacggcggtaaagtctttagcgatcgggtcaatgaatatctgcgtgagcgcgaacggtttggcgcgcaggaagatccctttagtatcctgaccgaacgagagttagatgtcttgcatgagctggcgcaggggctttctaacaaacaaattgcgtcagtactgaatatttctgagcagacggttaaggtgcacattcgtaatctacttcgcaagctaaacgtgcgctcgcgcgtcgcggcgaccattctatttttacaaacacgcggaatgcagtaacaagccaggcccggtggcgccgcgccaccgggccgtcagggtcttatttctcctgcgccagccggatactgcgctctatcaccgcccgccgggcgtcacccgccggcagtaacttcagcatcatctcccaggccgccaccgcctcgccaaagcgctgctgctcaaaggcgctgaacgcatacaggcttaacacccggatatccgtgtggtcgcggctcaccagctgacgcagcagctccccgccgcggcggttatcctccgggtcggacgagcgcgtcagcgcctccgcgtagcccagcgccgcatcgcggtttttcgggtccagacggtaagcgtttgcataggccccggtggcggtaccggcattacccagtaccataccggtgcgccccagcatgagccagccctcaacattgccggcatcattctgcaggcgggtgcgcagccccagcgccagccgcgccatctcctcctcattcagcggctgcgcctgcgggtccagcgcccgcgccagcagtcccggcgtctgcgccgttgcctgctgccaggccctcacctgcggatagctgccggtctgtgagtaactgatggcggccacgaccagcgccataaccacgcccggcacgtaagcaccccacccggcgcgcggtcccgccgcaggaatggcgtcggccaggacgtcctgtctgatacgcacccgccggcgcgtgcgggcgacgattatccacccgcccgccacgatggtggccagcggcagcacccacagcagcaccgtcagcggggtcagcggcgggtcgtaggtgacgaagttgccgtagcgcgccaccatgtaatcgatgatttcctggcggctcttcccctcctgcatcaggtcatacaccctgcggcgcatgtcggtggctatcatcgcgttcgagtccgcaatgctgttgttctggcatttcgggcagcgcagctgctccgtgagctggcggaactgctgctcctgcgcttcatctttaaacggcatcacgtcggtggtcgcccgcgctgacccggcgataaccagcaccagcatcagcatcaccatgcccggtaacagtctcattgcgccgcctcccggctgtatctgtcccacagcggtttcagttcactttcccatacccgggcattcaaatcgcccgcatggcggtagcggataatccccctgccgtcgatgaggaaggtttccggcgcgccgtacacgcccaggtccagccccagcatcccgtcgctgtccgataaactcagcgcatacgggttgcccagttcctttaaccaggccaccgccttcgcccggtcgtccttatagttcagccccaccacccggataccctgcgcagaaagctggttcaggtactgatgctcggcgcggcaggtcgggcaccaggtggcccagacgttaagcagcaccggtttcccctgcgtcagcacctccgcctgatagtactgacccggcgtctccagcgattccaggcggaacgccggcaccggctttccggtcagtgccgattcgagattcgtcgggtcatccccctgcgcgttgcgcgccagctgccacagcagcgccgcggcaatcagcagaaaaatcagcagcggtaataacagtacgttgcgtttcatccggcctccggcaatggtttacggcggcggtagcgcgggtccgccaggcacagcagcccgcccagcgccatcagcagtcccccggcccatatccagcggacaaacggtttgtagtacaggcgcacggcccacgcgccgttgtccagctcctccccgagcgcggcgtacaggtcgcgggtcagcccgccgtcaatcgccgcctcggtcatcaccatccggctggtgttgtagagccgtttctccgcgtgcagcaccgcctccggctcgccgtggcgcgtcaccccgatgagggccaccccgccgcggtagttgggcccggtgatgtcccgcacctcccggaaggtgaagcggtagtcgtgaatggtcacgctgtcgcccgcccgcatccgcacgtcacgctccacgctgtaattctggctgaaggcgatgccggtaatcgtcaccgccagcccgaggtgcgccgccaccattccccagtagctgagagaggttttcgtgccgcgggacacgcgctgtacggcttcggccaccgccagcaccgcaatccagcaggccatcgccatccccaccgccgtcatggcgatgattttatcttccagcagccatggcaaaagtaccgacagcaccagggtggagaccagggcggtgagcagcagcgtcctgatgttacgcggccggtcccggccccagcgcaccagcggccccacccccagcagcagggcaaaggggaccatcagccaggtgaacatggtgttaaagaacggctcccccaccgaaatgctgcccagccccagctgtttgtgcaccagcggcagcagggtgcccagcagcaccaccagcatggcggccatcagcaggacgttgttgccgagcagcagcgactcgcgcgaccacagcgcgttgttcacccgcgaacgcaccctgtgcccgcgcacggcgaacagcagcagcgagccgccggtgaccagcaccataaaggcgaggataaacatcccgcgcgccgggtcggaggcgaaggcgtgcaccgacaccagcaccccggagcgcaccaggaaggtgcccagcaggcacagcgagaaggcgcagatggacagcagcagcgtccacgccttaaagccggcgcgctgttcggtgaccgccagcgagtgcagcagggcggtgcccgccagccacggcataaaggaggcgttctccaccgggtcccagaaccaccagccgccccagcccagctcgtagtaggcccacgccgagccgagcacgatgcccagcgtcaggaacacccacgccgccagcgtccacgggcgggcaaaacgggtgaacgcgctgtccagacgcccgctcagcagcgcggcgatggcgaaggcgaaggccaccgagaagccgacatagcccatgtacagcagcggcgggtggaaaatcagccccgggtcctgcagcagcgggttcaggtcgcgcccctccaccggaaaggccggcagcgtgcgggcgaacgggccggaggtgaacaggatgaacgccagaaaaccggcgcagaccatccccatcaccgccagcacccgggcgacgatatccgccggcacctgccggctgaacaccgccaccgccagggtccagccgctcatcagcagcacccacagcagcagcgagccctcgtgcgccccccaggtggcggccacccggtaccacaccggcagctgcgtgttcgagttgccggcgacataggccacggtgaagtcgttaaccacaaaggcgtgcaccagcacgaaaaacgcgcccgccacgcagataaacagcagccaggcgaacaccccggccgacgccatcatccgcgcgtcaccgcgcgccacgccccacagcgggtaaacggacagcagcagcgccacgccgagcgccaggcacagcagcgcgtggccgtattcaggcatcatgatgaggtgtccttatcagcgcgttgcgggcggcggtggttttcctgcatcgccttttccacttccggcggggtgtagttctcgtcatgtttggccagcacctcgtgcgccaggacgtggttgcccttctccagggtgccctgcaccaccaccccctgcccctcgcggaacaggtccggcagtatcccctcatagctcaccgtcaccgacccttcggcgtcgtagagactgaagttcaccttcagcgagtccgggtcgcgcctgacactgccgggcatcaccatcccgccgacgcgcaggcgctggcccgccgccggcagctgctgcgtctcgcgcttgccgtagaggatttcgccgggggtatagaacaggtcgatattcgcgcgcagcgcgtacaggaccagggcggtggtcagccccaggcccgccagcaccgcgcagaccacccatagccggtttttacgtcgcaggttcacgcggcctcctgttgcgcctgtgcggcacgcatccgcgcctcgcgcgcccgctgctgcgccacgccgcgcagaatggcccggcgctgcagcaccgtgtgcagcgccagcagcgccagcggcgccacggtcatcgccaccgccagccagacaaaaaaggcgtacccgcccatggcgaaaaaatcgctccacgatgaaaatgccggactcaccggtgcccccttttcagtatcagttcgctcacccacgggcggcgtttttccatcagtaaaatcaggttgcgcatccgcatcagcgaaagcgtcataaagagcagcaggtagccggcgatggcccagcgcagcggcgagcgcatcgccgggtcgatactctgctgcatccgcgtcgagccctggtgcagggtgttccaccactcgacggaatagtggataaccggcaggttcaccacgccgaccagcaccagaatgcccgccgcgcgcccggccattttacggtcgtcaaaggcgtgccacagggcgatgaccccggcgtagagaaacagcagcaccagctccgaggtcaggcgcgcgtcccacacccaccaggtgccccacatcggtttgccccacgccgcgccggtgaccagcgcgatgaaggtgtacaccgcccccaccggcgccatcgccgcgacggcaaggctggccattttcatctgccagaccagcccggtgaacgccgccaccgccatcgccgcatagatacccatcgaccagatggccgccgggacatgcaggtacataatgcggtagccctccccctgctggtagtccgccggggcgaaaccaaagccccggacccagcccgtggccagcacaatgatgccggccgccgccagccacggcacgagcctgccgcaaatctgatacagccggggcggcgccgccagctgatgaagggttttccacatagtcgtcacctgacctcctgaaaccagtaaaatgtccgtcgcgccggggcgctactgcacgctgaggcgcagcgccgccgcggtggcgaacgggcttaacgtcgcgctgcccgccagcagcgctcccagcaccgccagatagccgtcagcgggtaaatgcatcgatgccgcgtccatcgccgcggcggcgaaaatcagcaccgggacactcagcggcagcaccagaatgcccagcaggacgccgccgcgccgcagcccggccgtcagcgcaacgcccggcgcggcgagaaaccccagcgccggcgtgccgagcagcagcgtcagcgccatgattttccagccgtacacgtccatccccagcagcagcgccaccagcggggagagcataatcagcggcaggccggtcaccgcccagtgggccagcaccttcgccagcaccaccgccggcagcggcaccggcagcagcatcagctgctccaggctgccgtcctgcaggtcgtcgcgaaacagccgctccagcgccagcagcgaggccagcagcgccgccacctggatgatgcccggcgcgatacgcgccagcagctgcggctgcggcccgacgcttaacggaaacagggtgatgaccatcaggaagaaccacagcgggccggcgatgtccgcgccgtggcggaacgccacgcgcagttcgagacagaagacacgccacatcacagcccggcccccccgccggtcagcgccaggcggcggacggtgtccgcggcccccggcagcggctggtgggtggtgagaatgaccatcccgccctgcgccgtgtgcgccgccatccgccgggtgaggcgcgccacgccgttaacgtcaatggcggtgaacggttcgtcgagcacccacagcgcggcgcgggtcagccacaggcgggccagcgccacccggcgctgctgcccggccgagagctgagcgaccggcacgtcctcaaatcccgccagcccggcctgcgccagcgcctccgggagacgcgcgccgtcgccggggtggaagaagtgcaggttctcccgcgccgtcaggcgggttttgatccccggctggtgccctatccacagcagactgcgatggaagctgtcgcgcacgcggcgcaggggttcgccctgccagtacacctccccgccgtccgggcgcgccagcccggtcagcaggcgcagcagggtggtttttccggcgccgttgccgccggtgacctgcacccactccccggcctccacggtgaacgacagcccgcgaaacagcgtcctctcgtcccgctcgcagtacagatctctggcttcaagcattcccactcatcaacgtcctgtcagaaacctggtttaacatcacgcatatccggcagtttatgcgcgatccctttgtggcaatcgatacaggtctgtccatcttttaccgcctgatcgtgcattttcgccgcgacgcctttttgcgcggtcagatccataaagtcgaaattgtggcagttacggcattcctgcgagttgttgtctttcatgcgccgccactcattttgtgccattgtcaggcgatgagcttcaaatttctgcggtgtatctatcagcccaaataccttcgcatacagctctttactggctttgatcttacggatcatcttcggcccccactcatgcggcacatggcagtcaggacaggtggcacgaacgccgctacggttgttgtagtggacggtttccatatactcctcatacaccgtgttgcgcatttcatggcagctaatacaaaactcttcggtgttagccttttccattccggtattgaagccgccccagaagatgatgccgccgataaaaccgattaacagcagcgtccccaacgccaggcggctggggctgcgccaccatcgccagacgcgctttatccagccgggtttacggttagaattttccataatgacctcttatttcccgtaaccttgcgagggggtaaaggtattgtcgataatcggcgcggtatcagactgcggtacgtggcactgcaggcagaaataacgacgcggcgcgacgttgcccgacactttaccgtcgctgtccataaagtgcgtcggactgatacgcggcgcgcccgtcgtacgataactttccacgccgtggcattgcagacagcggttggtattggtcgtcacctggtagccctcgacgctgtgcgggatcatcggcggctggttgacgtaatttagcggcatacgttcctgctctttcggcatacgaatcgccccttcctgcgtcccggatacttccggcgactggctcagatccactccgtttgccgcccaaaccgcaccacttaccaccagggcaagcgtggccatccattgacacagcgctttcatcaggtcatggcttttcattgtttcgctcccgaactccatcgcatttacacttcatccttcgagctgcctctttgttggctgcgctcgaaaatcccagtcacatcgttatctatgctcccggggatttcctcgcttaccgccgcgatgcatcccgaatgatgttgcgtatcgttattgtaaaaacatcctcagaacagacatccacgcagcgaccgcaggtcatgcagtcgcggtgagtgacctgcgccgggctttgctcatccagcaccggcgcacgtagcacatgcggttccgggcaaacatgaaaacaatccatacagcgattacatttctcacgttttttggccgtcacggtcactacgcctttactgcctagcacgccatacagcgcgcccatcgggcaaatatgaccgcaccaaccgtgctcaacgactaataaatcaaataaaaacaaagcaataatcaacaacgcgccgctactaaatcccataatcagactacgacctaacagcgacacgggattaatccattcccacagcagcgtgccggtcaacgccgaaccgattaacaccaccaccagaaggacgtaccgtatatggcgtggaatcgtcgcagactggttcaggtcaaatttcctgcgcatccagttagccaaatcggtaacggggtttagcgggcaaacccaactgcaaaataatcgctttcccgccagcgcatacagcacagcgataatcactgctcccgtcagcgccacggtagcgggaagatgtccactggcgagactttccagggtaatcagcggatcggtcaacgggagggtatcgaacagcaaactactgctgtagttgccatgcaaaacccaaaagcccagccacgggccgctgagaaacatccccagcaccataaactggctgatacggcgtaacaccagccaacggtggctacgccaccagccttttttcgcccgcgcttctcgcccggcgtcgcgtttacgatttgccatctttcccctccagccagccgaagcggtaatggtgtcctaactcccctttcgccaatgacaacggcaacacttttatcgctggttgctccagtacgcagactttttcgcatttgccgcagccggtacaggcgtcgctgtgtacggtgggcagaaagcgcgcatgtttgccggtgcgcatgttgcgatccagctccagcgtgatggcctcatcgattttcgggcattcgcggtaacaaacgtcgcagcgcagcccctgaaagttgaggcagttttcctgatccagcagcaccgccagccccatgcgcgagtcatcaatggaggcgatatctttattcagcgccccgctggggcagactttggcgcacggaatgtcttcacacatttcgcaggggatgtcgcgagcgacgaaatagggcgtgcctgccgatagtccggaggccagcgtcgccagttttagcgtgtcgtatggacacgcctgaacgcactgcccgcagcgcacacaggcgctggcgaagacattttcattcagcgcgccaggcggacgcagccgcacgcccgatgcgcgcgcggtttgctgttgcaagcccagcgccacgccaaccgccgccagcccgcccgcagtgcgcacaacatcacgcaggaagcggcggcggccattttggggtttcgctgtacgggacataacgcgttacaccttcgccagcttaacggcgcacttcttgaagtccgtctctttagagagcgggtccgtcgcatccagcgtcaggttgttcactagctgagcggcatcgaagaacggcatatacaccagtccctgcggcggacggttacgtccacgcgtttcgacaatcgaaatcacttcgccgcggcgggacgacactttaaccttatccccacgacgcagatcgcgcgctttcgcatccagcgggtgaataaagaccaccgcttccgggaaggcgcgatgcaattcaggcacgcggcgcgtcatactgccggtatgccagtgttccagcacgcgaccggtggaaagccacagatcgtactcgttgtccggcgactccgccgcgggttcaaatggcagcgcgaagatcaccgctttgccatccggtttaccgtagaatttgtacccttcccccgcttttacatacgggtcgttgccttcgctgtaacgccattgcgtctctttgccttccacgaccggccagcgcagaccgcgcgcgttgtggtaatcgtcgaacggcgccagatcgtgcccgtggccacgtccaaaccaggcgtattcttcaaacagccctttttgcagatagaagcccagctcacgagactcatcgtttaactgatcctctttcagctcgctcagcgggaatttgctgaccgccggcgtggcgaacagaacgtcatacagcgttttgccgcgcagctccggcttctgagccaacaacgcctccggccagacctcctcggttttaaaacgacgggagaactgcaccagttgccagaggtcggatttagcttcgcccggcgctttaatttgctgacgccagaactgcgtgcggcgttcggcgttgccgtaagcgccttctttctcaacccacatggcggtcggcaggatcagatccgcagacagcgcgctcaccgtcgggtaaggatcggaaacaatgataaagttacgcggatcgcgccagcccggcatccgatcttcattgatgttcggcccggcctgcatattgttattacacattacccagtagacgttcagcttgccgtctttcaacgcgcgatcctgcgccaccgcgtgtaaacccacttttgccggaatagtgccagcggggatctgccagtgtttttcgcagatatcacggtgtttttcgttcgtcacgaccatgtctgcgggtagacggtgtgagaaggttcccacttcacgcgccgtaccgcaggcggaaggctggcctgtcagcgagaaaggaccgcagccaggctgggagatttttccggtcagcagatggaggttgtaaaccaggttattcgcccacacgccgcgggtatgctggttaaaacccatcgtccagtaagagatcacgcgcttattcggatcggcgtagagctgtgccaactgttccagttgatctttcggcacgccggtcatttcagcggtcttgtccagcgtatattctgccacgaaggctttatactcgtcgaagctcatcggctcggaagcgtcggagcccggattcttcgccgctttttccagcgggtgcgtcgggcgtaagccgtagccgatatccgtcgcccctttacgcaggttcacatgctttgtgaagaaatcctgatttaccgcgttgttctgaataatgtaattcgcgatatagttaaggatcaccagatcgctttgcggggtaaagacaataccgttgtccgccagttcaaagctgcggtgctggaaggtggagaggacggcaaccttcacgttcgggtcggacaaacggcggttagtgatgcgcgaccataaaatcgggtgcatctccgccatgttggaaccccacagcacaaacgcatcggcctgctcaatatcgtcgtagcagcccatcggttcatccatgccaaaggtgcgcataaagcccaccaccgccgaggccatgcagtgacgcgcattcgggtcgatgttgttagagcggaaaccagccttgaacagtttcgcggcggcatagccttcccagatggtccattgacccgatccaaacatgccgatcgcttctggtcctttctctttcagggaggttttaaacttctcttccatcacatcgaaggcctgttcccagctcaccggcgtaaactcgccgtctttgtgatagctgccgtctttcatgcgcagcatcggctgcgtcagacgatctttaccgtacatgattttgggcaggaagtagcctttaatgcagttcagaccacggttgaccggcgcgtcggggtcgccctggcaggcgaccacacggccctgctgcgttcccaccaacacaccgcaacccgttccgcaaaaacggcacggcgctttatcccatttgatggcttcctgctgcccgacaacggcgcgggcgacgcccggcacgctcagaccggcagccgccgcagcggccgcaacggcgttagctttcataaagctacgacgactgagtttcatggtgtttcctcaccttgctcatcctgctggtgataaaccagcgacaccgccagtacgccctcgacattgcgtactgactcaattgtttgcatcagcgtttcactctgatctgcttccgccaccacgatcagttgcccgctttcaacatcgcttaacgcgacttcgcaacccggcaacgtgttcaactgtgtgccaatggcggcgatgttctgacttttggcctgcacgaccaggctacagacctgccagttagtgcgcatggtggttctccgctttgatggctgacacggggcagatagccacacacgccccgcatccgttacaggcctgcgagtcaagctgcggctggtaaataccggataacgtgggacgaaaggtaatggccataggttcacaactgtcctggcaacgatggcattcaaccgattgcctggcgaggcagttttccgtgagcgtaaaaaccagatcccaggccctggtgtggcgcggaagaaaaagcgattcggtacaggcctgcgcacaggcataacaaaagctgcactcgccccgtttgaaatctacgctcggatatccccccgcccctcgctgcaggatgtcggcctcacacgcctggatgcaggcgtcgcaacgcagacaatgtgcgagaaaataggtcgtttctctggcccacggcggaagaatcccattgctggcgttgcgccaactgccggtcaacatgcttcgacgggataaatcaaccatgatatcgcccttccataacgacacgcttccatagggagtgaataccaataaaaaccgtacaatttatgagtagttgtttttgtaaataagatatttcaggatgtgtaagagatgcataccccgatagaggtaaatgctgttgccggatcaaaagagtgccgggtaaagacccgtaaacgtgctttttctcacatttcaatgagttatatagatatttatataacgaaaaccactaatagctgataatttcatttacattatcaatatcagaatattccactatataaaaagacgctattttattaataatcttgaaaatatgagtaaatacagattaatagataatatgaatgtgttaatctgttgtcagtgaataccgaaaacagcagaaaggaaatactgtgaacaatcaaatgaagatgtttgtccctgccgtcgtcttcgccgccctcgccagcgcctctgcctgggctaacaatggcgataccgcccagccgctggaaaaaatcgccccctatccgcaggcggaaaaaggaatgaagcggcaagtgataacccttacccctcagcaggatgaatctaccctcaaagtggaactgttgattggccaaacgctgaatgtggattgtaaccagcatcgcctcggcggcacgctggaaacaaaaacgctggaaggctggggctatgactattatgtctttgataacgtcacctctccggtatcaaccatgatggcctgccctgaaggtaagaaagagcaaaaattcgtcaccgcctggctgggtgaagacgggatgctgcgctacaacagcaagctgccgatcgtggtgtataccccggcgaatgtggacgtgaaataccgcatctggaaagcggacgctaacgtacagaacgccgtcgcgcgatgatgttacgctgcccggtcacacttaccgggcatctgaacacgccgactcacgcagcgctccggggttctttttaaaacacgtctggaaacccgctcgcccgcagcaaaaaataccccgatgcctggtggcgacgcgtggcatcttatcaggcctacccgcgtgcggacgtagggctgccatcaggcggtttatccggcgccataatccattacgcagtacgcgcaaccgcatcacgcgaagcggcgtcacgttcgtcgccggtgagttcggttaactgcccgttacgcatttcaagcagacgatcggcgtgaataaaatagtgatcatcatggctgatggcgaaaatggttttgcccatttcctgcattaacggcaacagtacctgataaaactcccggcggaaatgcgggtcctgatcggcggcccactcatccagcaaaataatatcgcgctcttccgccagcgccagcagcagtgcaatgcgctttttttgccctttcgacagtttaagattcaagatgcgcccgtcgtttagttccagcttgtgcgtcattttcaggtgctcaagccacttttcgaccagcgcgggattggcgggtttcccctgcggccccagcaggcggtcgaataaccacacatcggtgaacaccgcagaaaacagtttgcgataatcttccggctgcccggcggcaataggttgaccgtcaagtaaaatcgttcccgattgcggctggtataaaccggtcaataacatggccagcgtcgatttcccgctaccgttgccgccaattaaaaacagcagttcgccgcggtgaatcgtcaggttgatgggccccacggaaaacgcgttatcctgatagtggaaaaccacgttgcgcagctccagcgtcttccagtcgggaaaggctttcggctgtggaaaatcaggcttatacggggcgagcgcgaatttattcagtttattaaacgccacctgggcggtcagtagcgttggcaacgcccccaccgcagacagcagcggcgtgcgcaggaacagcaacgtcagtgaataggtcgccgcgacgttggtatccgcccagccgagactattcgccatccagaagaccaggcctatcgctcccagcatcatgatattcgaccagttgacggcgctcagatgaaaagtatcggcacggataatgtgatgacggtactctttggcgtccggggtatagcattgctgaaaaatctgctccgcacgctcgcggtttagcgtcagctctttgcgtccttccagcaccgtctgatagtcgttgtacagcttatcttcggtctcgcgcagggtcgccatatgctggtaaacccgcgccaccagcacaaatccgccccagatagtgaccaccatccagatagccgtaaccagcagcatttttgtcgatagcatcgccagatacgccgccgagccgacggtgaggataatgccctgcaccagctcaggcagacgcacaaaggcgatagtaatattgcgaatatcgctggtcagaccggccagtaaagaggcgctgcccagttgctcaatgcgttcaacgtgcgtatccagaatgcgcttgataaattcgctgcgcaggcggtaaacgaaatggtgtcccagagtggtgagcgccagttgggaacctaatgtgacgaccattagtaacaggagcagaccgagaaattccggcagcaccatgacggtggtgtccaccgtttcaatcaggcgctgattgataaacgcgatcaggccaatccccagcgccgcgctggcgaggctcagcgccatcacgctaataaatggccagcggtactgccgccagacaagaataagaagttccatgcatacaacccggaccgataataacagcccgcagtttaactaactccacctgcacagcaataataattcttatttttattctttttcagctgcctgacggaaggtgagattgtaacgaaattcaccggtcatgggatgaaagcccgctttaagcggctggataccatgataaaacagccgggactcgccgccccagaccacgatatcgccatgctccagtaagatccgctggatcgggtcgctgcgacgcaggccgccaaactgaaaaaccgccggcacccccaacgaaactgagacaataggcgcgcgcagatccggctcgtctttatcctgatgcagcgacagttttgcgccgggcgcgtagcgattgatcaggcaggcgtccggttggaagctcgcataccctgccgcgattgccgcctgacgacatacgctggcaaacgataacggcagcgcaggccagggtttatcagtcaacggatcgcgcacggcataacaataaccgtgacgatcggtagtccaccctaacgcgccgcagttggtcatcgccaccgacatggtgtagccgcccggcgtcaccatctgacgaaacggagactgactggcgacaaacccgatatcgtctaatagcgactgcgccgcgcgaaacgcaaagcggcgcaacaccaccgcgccaggcgccaggggctcttgccagggcgcttcatcagcaaatagatccagcattgctactcctctttttgcgcttctcgctttaatagctgcgcttttcgacgcacgccccaacgataaccggagagcgcgccatcgcgacgcacgacccgatgacacgggatcaccatcgccagtttattcgcgccgcacgcgctggcgaccgcgcgtaccgccgtgggtttgccgatagtcgcggcaagctgttgatagcttacggtttcgccgcagggaattgcgcataacgcctgccagacctgctgttgaaacgcggttccctggatatccagcggcaacgagagcagcacatcgcgtgtgttgatagccgcgacaacctgccgcacccgttgctgaaaaagcgcgtcagcaggttcgtggcgggccgacgggaaaagggtgtgtaattcagccagtagcgcgtcgtcgctatcaccggggagaatcgcgcaaatcccccgctcgctctccgccaccaggcaccgtccgtaaacccagtccgtcagcgcatagcgaacggagacattatcgccgcctttgcgaaactgttttgccgtcatgcccagcgtctggtcggcatgacggtagtagctactgctatccgggaagccagcgcggtaaatagccgccgtgatcggctctcctttcgccaaagcctcacgcagccgccgggcgcgccacgcctgctgccaccctttcggcgtcattccggtgctcgctttaaacagacggtgcagatgaaacgggctcatcgccaccgcctgcgccagaaacgccagcgttaccggcgtctcctgctcaagcaaacggcaggcgcaggcaatcttatccaaccgccgttgctgcgcgcgcgcattatccggctgacagcgcttgcaggggcgaaaaccggcgtccagcgcctgctgcgcgttggcaaaaaagcgaacatttttacgtaacgcccgcttcgagcgacaagaaggacggcaaaaaacgccggtggttcgcaccgcaaaaacgaaacgcccatccgcgctggcatcgcgcgcctgcacccgcagccagcattcatcatcgataagtaacgcttttttcatcatagactccttcattaagcatagtgcttgcttacatgcagtgtgtccgtaaatccgcccacaaaaacccgtaatcttgcgttttaattcttatcgctcaccaggaacgttttgaactgcggcgacatccaggttttaaagccttcaccttctttcatgatcataaataccgccagcccttccctccgcacgacctcttgcgccttttgcgtaccaagcaccatcaggccggtgtcccagccgtccgcttccaacgccgttggcgcgatgaccgtaaccgataccagattgtgttcaatggggcgccccgtttgcggatcgataacgtgcgagacacgcttgccatccagctcgtaatagttacggtagctgccggaggtgctgatgccatgcccgttgatatccacaatcgcctgcactgcgttttcccggtcggtcggcttctgaatcgcgacgcgccacggctgcccctgcgcattcatcccgcgactgcttaatgcgccgcccaccgagaccagataacgcgcaatgccctcctgctccatcagacgcgccagatgatccgccgcatagccctccccgaccgtggagagatcaacataaagatccggcagatctttttgcaaaaactgatgtccagccctgtcgataacctgcaaatgttgcaggcctgttttcgcttttgccgcatcgatttgtgctggtgttgggatatgcagcggctgccgatccggcccaaacccccacagattgaccagcgggcccacggtgatatccatcgcgccatccgtcttcgcgccaatacgcagcgccgaggtcacgatatccgccatggcttcgctgaccggccagggcgcaagactgcgtgaatggttaaaacgcatcaacgcggagtcatttttataggtagaaagcaaccaatcatcagcatcaagctgagtctggattttagtctgtaactctgcggcgcgtttcgcatcgataccaaccacgctcacccgccagagagtccccatcgttttaccttccagcacctgagcggcaggtgacgctgttgtcgtttcgggagcctcatcgcagcccataagtagaaaagccgccgccagacacacggcccggcaaaaagtcattttcatcgctgtttatcctcattcgaatggacgcaagcgtatatcaaaacgtcgtatttgtacgccggaataaggcatgaaaaaagggcccgcaggccctttagcaacatcttttgctgattagaactggtaaaccagacccagcgctacgatgtcgtcggtgttgatgcccgcatcgcgggtaaagtcgtttttatccagcaggttgattttgtaatcaacataggtggacatgtttttgttgaagtagtaagtcgcgccgacatcaacgtattttacgatgtcctggtcgccatagctggcgccgtaaccgttgctgatgtccttacctttagactgcaggtaagccacagacggacgcagaccaaagtcgaactggtactgagcaaccactttaaagttctgcgctttgttggcaaaaccgtaagaggtggacgggttgctaccgttagaggtaccaaaacgggttgcgttataggtctgagaatactgcgctgccagatagatgttgttcgcatcgtatttcaggccgccggtgtaaaccgtggcgcgatcgccgttaccatacaggcgagcgttagcggtgttgttctgatcggcagtacgtttagacgtggtgatagcgccaccgacagagaagccttcgccgattgcataagtcagcgatccgccgtaaccgtcgccgttctggttcagcaggctgcgaccgttggtgttttcaccgctcacgctgccgtttttgccctgatactgtaacgcgaagtccagaccatccaccaggccgaagaagtcggtgttacggtaggtagcatagccgttaccacgctgctgcataaagttgtcagcgccgtaggtgtcgccgccgaactccggcagaacgtcggtccaggaggtcacgtcataggttacgccgtagttacgaccataatcgaaggaacctgcatcagcgaatttcagacccgcaaacgccacacgcgtccaggagtcgttgctgccttcagtctggttgccctgaatctgatattcccactggccataaccggtcagctgatcgttaacctgcgtttcgcctttgaagccgatacgcatgtaggtctggtcgccatcgctgcctttgtcgtcagagaagtagtgcaggccatcaactttaccaaacaggtctaatttgttgccgtctttattataaatttcagccgcattcgctgcgcccgccaccagcagagctggtaccaggagggacagtactttaactttcatgttattaaccctctgttatatgcctttattgcttttttatgccactgcttactggttaaccctcattaaccagtcggcaagtccattctccgcaaaaatacagaataatccaacacgaatatgatactaaaacttttaagatgttacagttatctacatagatgtttcaaaatatgaattttacggaacttttttaaagcaaaaatcaagtaaaaataagcacaaatagacaaaatatattcacgaaacttttaaaatcaacgggttaaattgatgaaattcatagcactgaatgataaaacagaatcttcattcgcaactaaaatagtgaccgctatcatcattaactttatttattaccgtcattcacttctgaatgtctgtttacccctatttcaaccggatgcttcgcattcggttttttttaccctttttcagacacacccggctgatttatgctacctgcctaaaactatcacggttattcactacactcccctgctcgaccgttcgtaagacattagcaaataatttcttgatatttagtgctaaacatttataagtagtctttatatttgtaccgttctgcgaaggttgtacgcttttcccgtcccgccgacggagcgcgtgttaagttgcccggcatgacgtaagagtctggaaattcattcattaccctttatactgcccttcaccttcagcgttgcttttacaggtcgtaaacataaatgagtcagtctgacacaacggtctctacccgattctcccttctaccgggaagcattacccgtttcttcttattgctgatcattgtgctgctggtaacgatgggcgttatggtacagagcgccgtcaacgcctggttgaaagacaaaagctatcaaattgtcgatatcacccacgctattcataaacgcgtggatacctggcggtatgttacctggcaaatttatgacaacatcgccgcgaccactacgccatcgacaggtgaaggacttcaggaaacgcgtctgaagcaggatgtgtattatcttgaaaagccgcgacgtaaaactgaagcgctgattttcggttcccatgacagcgccacgctggaaatgacgcagcgtatgtcaacttatctggatacgctgtggggcgcggaaaacgtgccgtggtccatgtattacctcaacggacaggataacagcctgattcttatctctaccctaccgttgaaagatctctcttccggctttaaagagtccactattggcaatatcgtcgattcccgccgggcagagatgttgcagcaggcgaatgcgctggatgagcgcgaaagtttctcctcattgcgaaaactggcctggcaaaacggtcactattttacgctgcgcacgaccttcaatcagccaggacatctggcaaccgtggtggcgtttgatctgcccattaatgatttaatcccgccgggaatgccgctggacagttttcggatagagcctgacgcaacccaagcgacggggcgaagcagtgaaaaggaagcgcctgatagcgtcacgattagctttaacggttcaaaaattgagatctcctcagcgcttaactctaccggaatgcgcctgatctggcaggtaccgttcggtacgcttttgcttgatacgttgcaaaatattttgctgcctttactgctgaacatcgggctgctggcgttggcgttatttggctacgccacgttccgtcatcagccgggacggtcgacggaatcgacatccggcaacgcggcgaataatgagcttcgcgtcttacgcgccattaatgaagagatagtttctctgctgccgctgggtctgctggtctacgatcaggaaggcaaccgcaccgtgatcagcaataaaatcgccgatcatctgttgccgcatcttaacctgcaaaatattaccagcatggcggaacagcatcagggcgtgattcaggcgacaattaataacgaactgtatgagatccgtctgtttcgcagccagatcgctccccgcacgcagatctttattattcgcgatcaggaccgggaagtgctggtgaataagaagcttaaacaggcgcagcgtttgtatgagaagaatcagcagggccgcgccgcctttatgcaaaatatcagcaacacgcttaaagagcccgtacgccaactggcggttaacgccgcagcagtcaccacgccggaaagcctgaaactggcggatcaggcggatgtattggtacgtatgatcgatgaaatccaactggcgaatatgctggaaaatgacgcatggaagagcgaagccacgctgttctccctgcaggatcttattgacgaagtcgtgccggaagtgctgcccgccattaagcgtaaagggctgcaactgctgattaataaccatcttagcggcaacgatgaacgctggggcgatcgtgacgccctgcgccggattttgctgctgttgattcagtatgccgtcacaacgaccgctatgggtaaaattacgcttgaagtcgagcaggatgaatctatcgcggagcgtctgactttccgtattctggatacgggcgaaggtgtaacgttaaacgagattgataatctgcatttcccgtatatgaatgaaacgcagggcgatcgttacggcaaagcgaatccgctcaccttctggctgtgcaatcaactggcgcgcaaactgggcggtcatctcaacattaaagcgcgagaaacgctgggcacgcgctataccgttcatgtcaaaatgcttcctcacgatcagcatactcaggtcgaagagcgcctgctggacgacgtgagcgtgatggtcgatgtgacgtccaacgaggttcgcgcgattgtgctgcgtcagttagaaaactggggcgccacctgcatcacgccggatgaaaggcagataagtcaagaatatgatctctttttaacggataatccgtctaatcttactgcctcgggcttgcttttaagcgatgatgagtcaggcgtgcggaaaattggcccgggtcagttgcgcgtcaactttaatatgagcaatgctatgcaggaagctgtactacaacttatcgaagagcagctggcgcaggaagagattcccgcctccccgctcggcggagatgaaaatgccgagcttcatgccagcggctattatgcgctatttgtagacacagtaccggatgatgttaagaggttgtatactgaggcggcaaccagcgatttcgctgcgctggcccaaacggcccaccgcctgaaaggggtgtttgccatgcttaatctggtacccggcaagcagttatgtgaaacgctggaacatctgattcgtgagaaagatgctccaggtatagaaaaatatatcagcgacattgacgcctacgtcaaaagcttgctgtagcaaggtagcccaatacatgaacaatatgaacgtaattattgccgatgaccacccgattgtactgttcggtattcgcaaatcacttgaacaaatcgagtgggtgaatgttgtcggcgaatttgaagattccacagcattgatcaacaacctgccgaaattagatgcgcatgtgttgatcactgacctctccatgccgggagataaatacggcgatgggatcaccttgatcaagtacatcaagcgtcattttccgagcctgtctattatcgttctgaccatgaacaacaacccggcgatcctgagcgccgtgttggatcttgatattgaagggatcgtactcaaacagggtgcgccaaccgatctgcctaaggcgctggccgcgctgcaaaaaggcaaaaaattcaccccagaaagcgtttctcgtctgctggagaaaatcagcgcaggcggttacggcgataagcgtctgtcgccaaaagagagcgaagtattacgcctgttcgccgagggtttcctggtcaccgaaatcgccaagaagctcaaccgcagcattaagaccatcagcagccagaagaaatcggcgatgatgaaactgggcgtagagaatgatatcgcgctgctcaactatctctcttctgtcaccctgagtccgacagacaaagaataaatcgcttttatgttacccagcctgatggcgctacgcttatcaggcctaccagtcgactcatcttttacaggccggacaggcgacgccgccatccggcattttttatgcccgcgttttacgtacccgctcggcatacaccgccagcgtctgtttcaacacatccagcgtcacaggcttcgacaaacagctgtccataccggactccaggcaacgttgtttctcttccgccagcgcgttcgccgtcacgccgacgacaggcagcgtcagcccaagctgacggatacgctgcgtcaggcgatagccgtccatgttcggcatgttcacatcgctcagaacaatatcgatagcatttttactcagcacattcagagcgtctacgccatcattggctgtcttacactgataccccagcgatcccaattgatcggccagcaagcggcgattgatcggatgatcgtcaacgaccagaatcatcatgtcgtcatttgaatctgcagttttatccgtcgtcggcaatgcgctggaaagcgcttcactatccagctcaatactatagatacgcgccaacagcgcgggcaactcatgcaccgacgccacactatgcacccactcgcccggcgctctttccaacggaatcccgatatgacggcggcaaaagacgaccgccgccctcccctgccaggtatgctccagcgcgtcatcgacaatcaaaatatcgtccgcggcgggttcttgcccttcataacgctgcgtatgaacgccgctacgcgccagactggtctcaataaactggcacaaagaagtattgcgcaccgccagccaacagcaggttccggcgagtccttccacgctctttttcacagggtattgcgcgccataaagcgggatgcgcagcgtaaactggcttcccatgccaggctccgaatcgacggaaatatcgccgtccatcatgctgatcaatttttcgcaaatcgccagccccagaccggtcccctgaaagttacgctgtacgccggttcccacctggaagaagggatcgaacaggcgaaccacctcttttgccggaataccgacgccggtatcccgcacgcgaatgctgagataatccccatcacagcgcacatgcagcacgatgcagccaatatcggtaaacttaatggcgttgctcaacaggtttgaaataacctgctgtaaacgcatcgggtcgccgttcagcgataccggcacgtcaggctcaataaaacaatacagaccgagctgcttacgcaccaccaacggcagataattggcggtgatatggttcatcacctctcgcggtgaaaattcgcgcggctcaatctttagctgttccgactcaattttcgagaagtcgagaatgtcgctgataattttcagcaacagactggaggagttattcatcgccgtgaccagacgttccacgccttttggcagctctttggtttgcagcagatcgagattgccgatgataccgtacagcggtgtgcgcaattcatggctgaccgtcgcaaggaacatggatttagactggcttgcctgctccgccgcctgcgccatctcttgcagcgactcttccattttgacgcgcgtactcacatctaccaacacgcaaatcgcgacgttttcattgcgatagcgggaatggacgaagctaatttgcaaattggtattattgctggtcaatacatcaacaaagttgacctgctggccgcaaataatttgcgtcaggcgctgtctgtcttcatgcgtgagcatgttcaggtaggtgtgcgccagttcgttactcagaatattgacaccatcaatagtgcgcagaatacagatccccaccggcgcggaggcgacgattttacggttgaactgttcatgctcttccagacgctgagcatcgctctccgccggaataaaaattcgccgctcatacatccgcgcaagcgtaaacagccctgcgcccaccagcacgttcagcaggatagcgttcaggataagaatacgaatacgctccaggactaaatctacaggcacagaatagacaatactgagcgaggatggcggcaggctttttttgagtaccagttcgcgaaaacctggcgtataaccaaaccaggaacgctcctgcatccagcgcggctccgctttaataatgccgtcaggaccggtcaacgaaatcagcgaatggccgttctcatcaataatagtgacgcccatcggcaaactgccgggcgtgaaaaaattttccatacggatggactgctcgacgcccagcagcgcctgcagacggttggccagatacaccggcgtcagcgcataaaagtagcccacgccctgacgcgcgccctggcttatccagaaaaggttattcccactttcttcctgcggcgcgttgcggtatttcataatccgctcatgtaacgcttttaacgcatcatcgcgctccacgggcatttcacgcaggccgaaattcgccatacagaggttatcgctgccaatcaggaaaacgcggttaagatcatacgccgctgaaaagttgtcgcgccagtaacgcataaaccaggccagcgactccagcgatccgcgccaggcggagcccatcgccgcacagtctgagtcggcaaatagcggttcaaagtccggcaccaccattttgtcatcacgcgcacgcgacgacatgacgccgttttccgccgttaaacggttctcggcgatatatttgagctctttcatcacatccgacgtgcgctggataaaacgctgcgcctgatcggagctaaggttgaactcctgacgaatttcagactcccgctggtgcagggcattgacgatgtaaaacaccgaaacaaaggcgattaagagccaaatgagtaacgctaacgctctgaataagtagcgcgagactttcagcgtagttcgaaaggaagcaaggtatttcaaaggggcgaagctccgcctcaggatgtaaatagagtgtgactaaggtagcggtaaatgacgtagcccgcaacggcaaagaaaaagggccggatatccggccctcgcacagcaataacattactcgtcagcgtcatccgcaacgtcgtcatcgctttccgcttccggggcgatatcctcatccccttccgccacgctgccgtcgatagcgtcgagttcttcgtcatctaccggttcagcaacgcgttgcagacccaccacgttttcatcttccgccgtgcggataaggataacgccctgggtattacgtcccactacgctgatctcggacacacgggtacgcaccagagtaccggcatccgtgatcatcatgatctggtcgcaatcgtctacctgtaccgcaccgacaacggaaccgttgcgctcggtcactttgatagagataacgccctgcgtcgcacgagacttggtcgggtactcgtccgctgcggtacgcttcccgtagccgttttgcgttacggtcagaatagcgccttcgccgcgtgggatgatcagagagacgactttatcgtctcccgccagcttaataccgcgcacaccggtcgcggtacgccccatcgcacggacggcgtcttctttgaagcgcaccactttacccgcggccgagaacagcatgacttcgtcagaaccagaagtcaggtcaacgccaatcagctcgtcgccgtcgttgaggttcaccgcgataataccggcggaacgcggacggctgaattcggtcagcgccgttttcttcacggtaccgctggcggtcgccataaagacgttgacgccttcttcatactcacgaaccggcagaatcgcggtgatacgttcgttggcttccagcggcagcaggttgacgatcggacgaccgcgcgcgccgcggctggcttccggcagctgatagaccttcatccagtacagacggccccggctggagaagcagaggatggtgtcatgggtgttagccaccagcaggcggtcgataaagtcttcttctttaatacgcgcggcagatttacctttcccaccacgacgttgcgcttcgtaatctgtcagcggttgatatttgacgtaaccctggtgagacagcgtcacgacaacatcttcctggctaatcagatcttcgatattaatatcggcgctgttggcggtgatttcggtacgacgctcatcgccgaactgatcgcgaattaactccatctcttcgcggatcacttccatcaggcgatcggcgctgcccagaatgtgcagcaattcagcaatctgctccagcagctctttgtattcgtcgagcagtttttcatgctccaggccggtcagtttctgcaaacgcagatccagaatcgcctgcgcctgctgttcagtcaggtagtactgaccgtcacgcacgccaaattctggctccagccattccggacgcgcggcgtcatcaccagcgcgctccagcatcgcagcaacgttgcccagatcccacggacgcgaaatcagcgccgcttttgcttccgccggcgttggcgcgcggcgaatcagttcgataatcgggtcgatgttggccagcgcaatcgccagagcttcaaggatatgcgcacggtcacgggctttacgcagttcaaaaatagtccgacgcgtcaccacttcacggcggtggcgcacgaacgctgaaatgatatctttcaggttcatgatcttcggctggccgtgatgcagcgccaccatgttaataccgaaggaaacctgtagctgggtctgggagtagagattattaagcaccacctcgcccaccgcatcgcgtttcacttcaatcacgatgcgcatcccgtctttgtcggattcgtcacgcagcgcgctgatgccttccacgcgtttatctttcaccagctcggcgattttctcgatcaggcgcgctttgttcacctgatagggaatttcatggacgatgatggtttcacggcccgttttggcgtcagcttcaacttccgcgcgggcgcgaatgtacactttgccacgaccggtgcggtaggcttcttcgataccacgacgaccgttgatgatcgcggcggtcgggaagtccggccccggaatatgttccatcagcccttcaatgctgatgtcttcgttgtcgatatacgccaggcagccgttaatcacttccgtcaggttgtgcggcgggatattcgtcgccatacctactgcgataccggaagaaccgttcaccagcagattcggaattttggtcggcatgacgtccggaattttttccgtaccgtcatagttatccacgaaatccaccgtctctttttcgagatcggccatcagttcgtgggcgattttcgccagacggatctccgtataacgcattgccgccgcggagtcgccgtcaatagaaccgaagttaccctgaccatccaccagcatgtaacgcagcgagaatggctgcgccatacgaacgatggtgtcatacactgcggaatcgccgtggggatggtatttaccgattacgtcaccaacgacacgggcagattttttataggctttgttccagtcattgcccaatacgttcatggcgtaaagtacgcgacggtgtaccggcttcaggccatctcggacatccggcagcgcacggccaacaatgaccgacatcgcataatccagataggagctcttcagctcctcctcaatgttgaccggtgtaatttctctcgcaaggtcgctcatctaaccgctatccctctactgtatcccggattcaaaggtcgcaaattataacacattcgcccacgtactggtaaacggaatgcagccagacaatgctttattcgggtgccgcatgctctcttcatttataagcgtggtcttggcgtttattggcgatcggcttcagaggcgacacaggggagatcggggcctggccaggaagaggttagaaaatcaatacctcccgtgtatacccgtcatacttcaagtttcatgtgcgttggctgcgagttactcggcccatccctgggcctcgccccgtcgcggttagcgcaagcgctgttcaagacggttaaccattttatcctgcaactcgaattatttaggggatatgccgggaggcataaaccataatcagtatcaccagatgctatttaatcacataggccagatattctttcactacctcatcgtttaattcctgacccaatccgggctgttccggcgcgacataatagccattttccggttgataatcgtgggtacaaagttcccgaatagatgctttcatcgcattggtatgatgctcatgaataataaagttgggaattgctgtttccatatgcagcgcggctaccgtggaaacaggaccgccgcaaacatgcacctgtacagtggtgtcataaatattagcatagtcacagattttctttccttcggtaattccgccgcagagacacaaatcaggttgcgctacggcaatagactgcttctccagtaattccctgtatccccatcttgtgtaggaacgctcgccagtggcgattggaatcgttgttgaacgggaaactttctgcatattatcagaatttaatggatgaatcggttcttcataaagaaagatacgatacttttctatcgccttcgcaaattgaatagctgagtttgtaccgagaagagaatggatttccacgataatatcagcatcatcccccattgcttcacgcatagcggcaattcgcgcttcccccatttttaattgatcggccagtaacaatcctgaatagttacgatttctattctgaaaaacacagtcatcgccattacgatcgatttcgagtggatccactttaatcgcatcatatccatcgtcaagagccgcacgcgccgcctcagcatattcctcaggtgtcactaatatatggcgtttatccccccaaccaaattgtaactgactagcataggttcttaatttttcattagttttcccgccaaggagctgataaacaggtacacctaaatatttacctttgatatcccaaagagcaatatcaatagcgctcattccggcataaaaaacgttcccgccccccatcccccaaaaagtctttctgaaaaagaactcccaaattttttcgatatttagtggatcttcacccacaatcaatggcgccagatctctgatgatccctacgccagctttagcgcctgcgccataggccagtcctacttcgccaataccacttaatcctgagtcggtattcacccggataagtactggattataggaggacatcgtttgatctcttttttttaattcacagtcaaaaacttcaatagacgtaattttcataatttctccatttatcaggttcgtgatacaacatttgtttgttggcttttttcttttttcacatcaattttcattaacgccaaaacggctaccgcagcgaagcaaagtattgcctctacaataaatattcctgtcgcaccataatgagtagaaacgaatcccagtgatttattaatcaggaatccgccaagacttgaacatgagttaataaacgcaatgctgatagccaaccctgacggcgacaataatgcagaaggcagcgcccagtaaggtccgtaatagctgaggatcccaacaccatagaacgttagccccagcattctcagcgacattgaggggacaagagcaatcatcagaaaaccacagcctgccagaaacatgggtaatgcagcatgccattttcgttcattctttttatcggaatgccagccccaccagggcatgctgaacatagcgaaaataaacggaatactcatgattaaaccaacgtcagtatccgtaaaatcagctgaaaatcccttcaccaaccccggcaaccagtagtttgccgccagagcagccgcctgaatcaacatgtaggcgaaagaaagctgaagcaaaactggatttttgattacggaaagaaaggatgagttggtatttttatttaatgcagctgcggtttcattgtcagtacgtaatttattaactaaggccgatatctgctgtggcgtaagccatttagccttttctggactgtcaggcagtaaataaaatgtcaggatgccaaggaatacggtagggataccttcaatagcaaaaagccagcgccagccttcataatccggggtattcaaatgctcgatgatccaaccagacatcggtgcagccaataccgatgcaacagcaatagataacatgaagaaactattgacttttccgcgttcacgagccgggaaccagcatgcaagataataaaccatgcccgggaaaaagccagcttcaaatacccccaaaaaaatgcgagccagcaaaatatgttgagtatctttagcaaaaaaaatcagcccagttaccgctccccagccgataataatggaactaatccattttcttgcgccaagcttttgcaagccaatgctactcggaatttgaaagattaaatatgatatgaagaatatagaagaaatattagcgaaatcctcaggcgtaataccgagagattcattcatgcgtaatgcagcaaacccaatattgacacgatccatatagttaaaaaagtaaagaataaaggccaaaggaatgattttcctttttacaatacgaattgcatcgtataaattttcttgtggactactcattttgcatcaccttttatgattcaatgaataagggtattgaccggaatcgatgttacgtaaaaaacaatacaattcaaaagctaatgtgtcatatctgatatatcagcaagcaaacttaatgaaatatacaataacaacaataaagtatgtaaattttcttatatctgatatattagatccgttaattttgaataaattaattacaatggagccgggtttaaccatggaggagaagaaaatgaaaaatagattaaagcgtgactttagtcacatatcaattgaaatacccaaatccatcacccaggtgattaaagagaaaataagggagatgattatccatggcgatttcgatcttgggcaagcgatcagtgaaaatgaactatcaaatattctgatggtaagtaaaacaccaattcgtgaagcttttatttggctgagctataatgaaaacttagtcaacatcattccccgcagtgggacatttgttttttctgtcaccgacgaggatatcaatgatctcatcaaaatgagggttatccttgaacagggcgcaattcgtgaagcgatggagaaaaatgctaacaatgtcatagtcgaattaagcaatattttatcgaagtcagcaaaaattaatgcagagcgagatacgcaagcttacctcaaactggatcatgattttcattatgtttttgtgaaatatgccgataataaatacatttcacaagcacacctgttgatctcagcacgtttattggcaattcgctacagactggattttaccgctgaatatatcaccagctctaaccgtggacatgccactattttggatatgttaaaaaacaacaacgtcgagggcgtctgtaattttatcacgcaccacatcggtagcggttttacagaacgcgcaagaaaacttcttgcgctgaaagcgtaataaagacggcagtagatataacgcagcgactttgcacctgctatactgccccgatagatcaatagcggaatctcatgtactcatgaacactgaaaaaccgtcggtagctcacaacgttgaccataatgaaatcgccaaattcgaagccgtcgcgtcgcgctggtgggatctggagggcgaattcaagccattgcatcgtatcaaccccctacgccttggctacattactgagcgctcaggcggcctgtttggtaaaaaggtgctcgacgtcggctgcggcggcggtattctggcggagagcatggcgcgcgaaggcgcaaccgtcaccgggctggatatgggctttgagcctttgcaggtcgccaaactgcatgcgctggaaagcggcatcgaggtagagtacgtgcaggagacggttgaggaacatgcggcaaaacacgcccagcaatacgacgtcgtcacctgtatggaaatgctggagcacgttcccgatccgcaatcggtcgtccacgcctgcgcccaactggttaaacccggcggcgaggtgttcttctcaacgttgaaccgcaatgggaaatcctggctgatggcggtcgtcggcgctgagtatattctgcgcatggtgccaaaaggcacgcacgacgtgaagaaattcattaagcctgctgaactgttaagctgggtagatgaaaccgtcctgaaagagcaacatatcaccgggctgcactacaacccgataaccaatactttcaaactcggtcccggagtagacgttaactacatgttgcatacccgcgctaaaaaagcctgacatcaaagaattttcctataagggttgcgttagatcatcgggcgcaacctttctcttcgatgaagaaatcagcattcgatcaaattttgatttttttttatgaattgttgacatcctctccaggccttatcagacgcgcatttagcgattcttacgcttttgcaaccgcaatttaacgccaaaatcaactcttgtactcaaaagaatccctactagaatactcaccatatagcgtttcacttatcgattaccccctatatatagtatttatccacagagttagtcacaacgtggcgttgtggataagcggggggatatttttctttcacggacaggtaaacaggtagaaaaccacatgaatcagagtctgctggtgacaaagcgtgacggccgtactgagcgcatcaatctcgacaaaattcatcgcgtgcttgattgggcggcagaaggactgaataacgtatcggtttctcaggtcgagctacgctcgcatattcagttttatgatgggattaagacctccgatatccatgaaactattattaaggctgccgcagacctgatctctcgcgatgcgccggattatcaatacctggctgcgcgtctggcgattttccacctgcgtaagaaagccttcggccagtttgagccgcccgcactttaccaccatgtggtaaaaatggttgagcttggcaaatacgacaatcatctgctggaagactacacggaagaagagttcaagcagatggattcgtttatcgttcacgatcgcgatatgaccttctcctacgctgccgttaagcagctggaagggaaatatctggtgcaaaaccgcgtgaccggcgaaatctatgaaagcgcacagttcctctacattctggtagcggcctgcctgttctcgaactacccgcgtgaaacgcgtcttgactatgtaaaacgtttttacgatgcggtctctacgttcaaaatttcgctgccgacgcccatcatgtccggtgtgcgtaccccaacccgtcagttcagctcctgcgtactgatcgagtgtggcgacagtctggattccatcaacgccacctccagcgcgattgtgaaatacgtttctcagcgcgccggtatcggtatcaacgctggccgcattcgtgcgctgggcagcccgattcgtggcggcgaagccttccacaccggctgcatcccgttctacaagcacttccagacggcggtgaaatcctgttcgcagggcggcgtgcgcggcggcgcggcaaccctcttctacccgatgtggcatctggaagtggaaagcctgctggtgctgaaaaacaaccgcggcgtggaaggcaaccgcgtacgtcacatggactacggcgtacagatcaacaaactgatgtatacccgcctgctgaagggcggcgacattacgctgttcagtccgtcggatgtacccgggctatacgatgcgttcttcgccgaccaggacgaattcgaacgcctgtacgtgaaatatgaacacgacgacagcatccgcaaacagcgtgtgaaagcggtcgaactgttctcgctgatgatgcaggaacgcgcctctaccggtcgtatctatatccagaacgttgaccactgcaatactcacagtccgttcgatccggttgtcgccccggtacgccagtctaacctgtgtctggagattgccctgccgaccaaaccgctgaacgatgtcaacgatgaaaacggcgaaattgcgttgtgtacgctgtctgcattcaacttgggtgccattaaaactctggacgagctggaagaactggctattctggcagtacgcgctttggatgctctgctcgattatcaggattacccgattccggctgccaaacgcggcgcaatgggccgtcgtacgctgggcattggcgtgattaacttcgcctactggctggcgaaaaacggtaagcgttattccgacggcagcgccaataatctgacgcataaaaccttcgaagccattcagtactatctgcttaaagcgtccaacgaactggcgaaagagcaaggcgcctgcccatggttcaacgaaaccacctatgcaaaaggcattttgccgatcgacacctacaaaaaagatctggatgcgattgtcaacgaaccgctgcactacgactgggaacagctgcgtgagtcgatcaaaacccacggtctgcgtaactccacgctatcggcgctaatgccgtcggaaacgtcgtcccagatctccaacgccaccaacggcattgagccgccgcgcggctacgtcagcatcaaggcctcgaaagacggtattttgcgtcaggtcgtgccggattatgagcatctgaaagacgcttacgaactgttgtgggagatgccgaacaacgacggttatctgcaactggtgggtatcatgcagaagtttatcgatcagtcgatttccgccaataccaactacgatccgtcacgtttcccgtcaggaaaagtgccgatgcagcaactgctgaaagatttgctcaccgcgtataagtttggcgtgaaaactctgtactatcaaaatacccgcgacggcgcggaagatgcgcaggacgatttggcgccttctattcaggacgatggctgcgaaagcggcgcttgtaagatctgatgaatagtgccgggtagcgctatgcttacccggcctacgattgtacggtttgtaggccggataaggcgcttgcgccgccatccggcgctcatcccataaaggattcacttcaatggcatacaccactttttcacagacgaaaaacgatcagctcaaggaacccatgttctttggccagccggtcaacgttgcacgctatgaccagcagaaatatgacatcttcgaaaaactgatcgaaaaacagctctctttcttctggcgtccggaagaggtcgacgtctcccgcgatcgtatcgattatcaggcgttgccggagcacgaaaaacatatcttcatcagcaacctcaaataccagacgctgctggattccattcagggacgtagcccgaacgtcgccctgctgccgctcatttccatcccggagctggagacgtgggtagagacctgggcgttttctgagacgattcactcacgatcctacacccacattattcgtaacatcgtcaacgatccggctgtcgtttttgacgatatcgtgaccaatgagcaaattcagaagcgcgccgaaggtatctccgcctactacgacgaacttattgagatgaccagttactggcacctgctcggtgaaggcacccataccgttaatggcaaaacggttgtcgtgaatctgcgtgagctgaagaaaaaactgtatctgtgcctgatgagcgtgaacgcgctggaagccatccgcttctacgtcagcttcgcctgctctttcgcatttgccgagcgtgaactgatggaaggcaacgccaaaattatccgtctgatcgcccgtgacgaagctctgcatctgaccggcacgcaacatatgctgaacctgttgcgtagcggcgtggacgacccggagatggcggaaatcgccgaagagtgtaaacaggaatgttatgacctgttcgtgcaggcggcgcagcaggaaaaagagtgggcagactatctgttccgcgacggttcgatgatcggcctgaataaagatatcctgtgtcaatacgttgaatatattactaatattcgtatgcaggcggtggggctggatctaccgttccagacccgctccaacccaatcccgtggatcaatacctggctggtgtccgataacgttcaggtcgctccacaggaagtagaagttagctcttatctggtcggacaaatcgattcggaagtcgataccgacgatctgagtaatttccagctctgatgggacgcgtcacgctgcgtatcactggcacacagctgctgtgccaggatgaacacccttctctgctggccgcgctggaatcgcataacgttgaggtggagtatcagtgccgcgaaggttattgcggctcctgtcgtacccggctggttgccggtcaggttgactggattacggaacctttagcgtttatccagccgggagagattttgccctgctgctgcagggcaaaaggcgatatcgaaatcgagatgtaactcagtgcaactcgctggtggaaaccaacggcatcacgccacgttttttcatctgcacggcatacagtgcgccagcgagtaccaccaacaccgcgccagcgacataaatcatacgatagccaactgactcaaccatcattcccatgataaaggcgccaatcgccattccggcgtccatcgcgttaaagaacagtgaattcgccacaccgattttatgcggttcaaccgagctgataatttgcgtctggaagaccggcgtgaccgaaccgtagccgataccgatgagaccaccggaaataatcatcatgatgctgccattggtgtagcccagcgccaccagaccgatggtaaaagccaacagacatggataaacaacatatttcggcccttttttatcacaaatattcccggtgaaggtacggcatatcatcagtaaaatcgcgtagcacagcaggaaattactggccgccgccattaaatccagctcacgcgcatacagcgccaggaaagccgacacgccggcataggagaaagtcataaaaaaggtgaccagcgcaaaaggcaaggcggcgcggtcaaacatcgcggaaaaacccagattcggtttcgaaccatcggcatgacgaattaccggaggaaccgtcacaatcagggaaagcacaatccctaacgccgctacagcggaacaaagccagaatgcggcagtgaacgcgtcccagcgggccatattcaaaccgatccacggtcctacgaccatcgccaggcccatcgctaaagagaaaaagctgatgccctctccacgtcgggaggccggaattaaccgcgctgaaatagttccttttaccgtggtaataacaccaaacgtaatcccatgaagtacgcggataaagagcagcgactcgatagaatggcaaaccggatacagcgcggtaatcaccaaaaaagccagagaagagagcaccagaatctttttattcgaatattttcccacccattgtccggcaaatggccgaataacaattgccgcggccaggaaacatgtcactaacagcccggccttatctgcagaagcatgcaggcggtcagcgatataaatgggtaataaagttagcagtacataaaaaacaaaaaagataataaaactgactatggtgattgcccaaaaatctttcgtccataatttttctttcattcttaacgacccgctcagatggcgcacgcaggcaacgctcagctcaactgaacacctatcaggtgcgtcaaaatgtgatgtattcgatagaatcacagtataaacaagtgcactctattagaaaaattaatcgttttaattatattgattaggttttactaatgacactaacccaaatccacgccctgcttgccgtactggagtacggcggatttaccgaggccagcaaacggctatacatgacgcaatccgccgtcagccaggccatctccgcgcttgaggaggagctcggcgttgacatattgattcgtgagcgtcgtaaagagatcgagcttaccgccgccggtagccgcatcgtcaggcacttacgcgcgatccagcgcgacgtcaacgcggtaaaagagattgccgaacaagaaaaaaagaacccggcccgtacgctacggattggctgttttcccagcgcctgcgcctgcattttacccggcgtcattcgctattttgaaagccatcatccaaatgtaaaaattatcccttatgaagagaacagtacggctattattgattcgctgcaggacggaagtattgatgccggtttcgttccttttccggtcaacggtatgtattgcgtccccatttaccgggataaattcaccgtagtggtgcctgaaaatcatcccctggcggccaatagtacggtaacggtcgaagaactgatggacgaaccacttattgtcagtaaaggtcgttatgaattaagcattatggcgttgtttaaagaaaagggtattgagccgatatttaaatatgaatttaaccatcccgatactgcgctgaattttattcgccagggattaggtatcgccttattgccagaattaaccttaaaagccacgacaggaaaattatgctccgtggcgctggaacccaccttttatcgacaaatttccctgttagcaaaagaaccgccggtagaaggaagtccgctatttttattacaaaaatgtatggaaacactgaccgatgaggggttgctataaaacaaccccgcctgatggcattgcgtttaccagacttacgctggcaaacgttgcgccaggccggatgaggcgtttatgccctcatccggcgcgtcacttcgactatggcaaacctttagtcatttttttgcaggaacatgaccgccttatccgggaagtcagtgaacagcccgtcgacgcccgccttgttatacaggatgtcgtacaactgattgacgtctgtggcatagtccggcaattgatcggcacgcacagtgtaaggatgcactaccatcttattctgatgcgcgtcttgcaccattccagtcagcttgatattccctttcgttgagccttccgcaaccagcatatggtaatccggaccaataccgtccgcatattccgccacctgcttcatagcgcccggcttaaacatccagtcgtagttgtaatttacccaacgaccgtccggctgtttctgctgtgtttcattccagtcggtatacgcaataagttgaaccagattgagatccatccccattttgggttccagttcattcttaatacgtttcagctcagcgacatcaaaacactgcaaatagacattgtcctgcttgccggtgtaaccatacttcttcagcacttccagcgttttcgcggcaatatctttcccttcctgatgatggaaccacggcgctttaatttccggataaataccgatatttttaccggtagagtgatttaatccctgaacgaattcaatttcctcttcaaaggtatgaatgcggaaatcagattttcccatcgggaaacggcccggataagtttgtacttttttgccgttttcaatatcaaacccttcggtaaacttcagggatttaatttcatccagcgtaaaatcgatagcgtaatagcgcccatctttacgcgcccggtccggaaaacggtcagcgacgtcagtcacccggtcaaggtagtggtcatggaggacgaccagatggtcgtcctttgtcatcactaaatcctgttccagataatctgccccttgcgcatacgccatcgctttcgccggtagcgtatgctccggcagataaccgctggcaccacggtgggcgataacgactttttcagccgccacggcgccgcttccgatggtcattcctgccaacattaacgccacgctaaggtttttcagtgtggttttcatgttattagcctccgttgcgttttaactgcagctcatcatgatggcgtttttcaccaatcatcacgaccaccagcaggattaccgccagaatgctgccgccaatcatcaccataaagccgccatcccaaccgaagaagtcaacggtataacccacaatggcgcttgcagcgacagaaccgcccaggtaaccaaacagaccggtaaagcccgccgccgtacccgccgcttttttcggcgccagttccagcgcgtgcagaccgatcaacattaccgggccgtagatcaggaagccgatgataatcatacaagccatatcaacgttcgggttccctgctgggttcatccagtaaacgatggtcgcgatagtcaccagggtcataaagaacacgccggtcgcgccacggttgccgcggaagactttatccgacatccagccacacagcagcgtgcccggaatacccgcgtattcatacaggaagtaggcccaggaggatttatccagtgcgaaatgcttcacttctttcaggtaggtcggcgaccagtcgagaataccgtagcgcagcagataaacaaacacgttggcgatagcgatgtaccacaacagtttgtttggcagtacgtactgcatgaagatctgcttcgcagtcagctcttcttccgctttttcgttgtagtcgtccggatagtcgtttttatactcttcgataggcggcagaccgcaggattgcggcgtatcgcgcatcattgcgaaagcgaacagcgccaccacaatcgcgccaaaggctggcatatagagcgccgctttccagtcgttaaaccaagccatccccagcaggaacagcagtggcgggatcccgccgccgacgttatgcgcgcagttccagaccgacacaatgccgccgcgctctttctgcgaccaccagtgaaccatcgtacgaccgcacggcggccaccccatcccctggaaccagccgcaaaggaacaacagtacaaacatcacggcgatgctggatgtcgcccacggcacaaagcccataaacaacatgactgctgcggccagaatcaaccctgccggcagaaaaacgcgcggattcgagcgatcggacaccgaacccattataaatttcgaaaaaccataagcgatggaaatcccggacagcgcaaagcccagatcgccgcgtgaaaaaccctgttctaccaggtagggcatcgcgagggcaaagttcttgcgcaccagataatacgcggcatagccaaagaatatccccaggaaaatctgccagcgtaatcggcgataggtcggatcaatctccgccgctggcaagcgcgctttatgcggcgctggtttaaaaatactcaacatattgtagcctccgtggcccatattttatttagaggtaaacaccgcagttcgttcaaacaaccccgctgctcccagtgtggccgcgatgttaagtaaagatacgtcacgttaatgtgaattacagcacatattgttacagatttatgactaatgttcagaaaggcgcacgaaatcacgtttcattttcgaatagtgagcgattatgcgcgaaatcaaacattccatatgatttgtatggctaaatgataaaaaacgaactgtgaggaaaaacaatgaaaactcgcgactcgcaaacaagtgacgtgattatcattggcggtggagcaacaggcgcagggatcgcccgcgactgcgcgctgcgcggtttacgtgtcattctggtggagcggcatgatatagcgaccggcgcgaccgggcgtaaccacgggctgctgcacagcggcgctcgttatgcggttaccgacgcggaatccgcgcgcgagtgcattagtgaaaaccagattttaaaacggatcgcccgccattgcgtcgaaccgacggatggtctgtttattacgttgccggaagatgatcttgcgtttcaggccacctttattcgcgcctgtgaagcggcaggcattcgcgctgaagccatcgatccgcagcaggctcgcatcatcgaaccttccgttaaccctgcgctcatcggtgcggtaaaagtgccggatggcaccgtggaccctttccgccttaccgccgccaatatgttggatgccagagaacatggcgcaatcgtgttaacggcgcatgaagtgaccgggctcattcgtgaaggcgcaacggtctgcggcgtccatgtgcgcaaccatctcactggcgaaactcagacgcttcacgcgccggtggtggtcaatgcggcaggtatctgggggcaacggatcgccgaatacgccgacctgagtattcgcatgttcccggcgaaaggctcgctgttgatcatggaccatcggatcaaccagcatgtcattaaccgctgccggaaaccatcggatgccgacattctggtacctggcgatacgatttcactgatcggcaccacctctacccatattgattacaatgagatagacagcaaccgcgtcaccgcagatgaagtcgatatcctgctgcgtgaaggggaaaaactggcccctgtcatggcgaagacgcgtattctgcgcgcgtattccggcgtccgcccgctggtggccagcgatgacgatcccagcggtcgtaacgtcagccgcggtattgtgttgttcgaccacgccgaacgcgacgggcttgatggcttcattaccattaccggcgggaagctaatgacttaccgcctgatggcggaatgggcgaccgatgccgtgtgccgcaagttgggcaatactcgcccctgcatcacggcggatacgccgttgcctggctcaaaagagtctacggaacatacgctgaaacgcattatctcgcttcccgcgccgctacgcggatcggcggtttatcggcatggcgatcgcacgccggggtggctgagtgaaggccgccaacaccgtagcctggtctgtgaatgcgaggccgtcacggcgggggaagtgcagtatgccgtcgaaaacttaaccgtgaatagcctgctggatctgcgccgtcgcacccgcgtagggatgggcacttgccagggcgaactgtgcgcctgccgcgcggccgggctattgcagcgttttaatgtgacgaccgcggcgcaatctattacgcaactctctgaatttctgaatgagcgctggaaaggcgtacaacctgtcgcctggggagacgcgctgcgcgaaagcgaattcacgcgctgggtttatcagggattatgcggtctggagaaggagcaccaggatgaaatttgatacggttattatgggcggcggtctcgccggtttgctatgcggactgcaactccagcagcatggattacgctgcgccatcgtcacccgcggacaaagcgcgctgcatttttcctccggctcgctggatctactcagcgccctgcccgacggccaaccggtgactgacattaccgccgggcttgatgcgctgtgccgccaggcgcctgaacatccttattcgcgtttaggcgcgcaaaaagtccttacgctggcgcaacaggcgcaaacgctacttaacgccagcggcgcgcagttatacggtgacgtacagcaggcgcaccagcgtgtcacgccgcttggcacattgcgttcaacctggcttagctcgccggaagtaccggtctggcccttatccgcacagcgaatttgcgtcgtcggcgttagcggattactggatttccaggcgcaccttgcggcagcgtcgctgcgccaacgcgacctcaacgtggaaactgcagaaatcgaccttccggaactggacgtactgcgtgataacccgacggaatttcgcgcggtcaatattgcgcgtctgcttgataacgaagaaaaatggccactgctgtacgacgcgctgtcgccaatagcgacaaactgcgacatgatcatcatgcccgcctgtttcgggctggcgaacgatacgctgtggcgctggcttaacgaacgtctgccctgcgcgctcacgctgctgccgacgctgccgccatcggtgctcggtattcgtctgcacaatcagctccagcgccagtttgtccgtcagggcggcatctggatgccgggcgatgaagtgaagaaagtcacctgccgtcgcggtaccgtgagcgaaatatggacccgcaaccatgccgatatcccactgcgcccgcgttttgccgtacttgccagcggtagcttctttagtagcggtctggttgccgagcgcgaagggatccgcgaacctattttagggctcgacgtacagcaaacggccacccgcgccgaatggtatcaacaacatttcttcgacccacagccctggcagcagtttggcgtcgtgacggatgacgctttccgcccctcccttgcgggcaacacggtagaaaatctgtatgcaataggttctgtgctggcgggattcgatcctatagctgagggatgcggcggcggcgtctgcgcagtcagcgccctccaggccgcgcaccatatcgctgagcgtgcaggagaacagcaatgagcgacacacgttttgaaagttgtataaaatgtacggtgtgcaccaccgcgtgcccggtcagccgcgttaatcctggctaccctggccctaaacaggccggaccggatggcgaacgcctgcgtctgaaagacggcgcgctgtatgatgaggcgctgaaatattgcattaactgcaaacggtgtgaggtcgcctgtccgtcggacgtgaagattggcgatatcatccagcgcgcccgcgcgaaatacgatacgacgcgcccgtcattgcgtaactttattctcagccataccgatctgatgggcagcgtttcaacgccgttcgcgccggtggtcaataccgccaccgcattaaagccagtgcgccagttgcttgattacgcgctcaaaatcgatcatcgccgcaccttaccaaaatactctttcggcaccttccgccgctggtatcgtagcgtggcggcgcagcaggctaaatacaaagatcaggtcgcctttttccatggctgttttgtgaattacaaccatccgcagctcggaaaagatctgattaaggtgctgaacgcaatgggtactggcgtacagttactgagtaaagagaagtgttgcggcgtaccgctgatcgctaacggttttacggataaagctcgcaaacaggctatcagcaatgtggagtcgctacgcgaggcgattgccgtcaaaggtattccggtcatcgccacgtcatccacctgtacgtttgcgttgcgcgatgaatatcctgaagtgctggacgtggacaacgccgggctgcgcgaacatatcgagctggccacccgctggctatggcgcaaactggatgcagggaaaacgctgccgcttaatcctttgccgctgaaagtggtctaccatacgccgtgtcatatggaaaaaatgggctggacgctttacacgcttgaactgttgcggcaaattccggggcttgaattgacggtacttgattcacagtgctgcggcattgccggtacgtatggatttaaaaaggaaaactatccgacatcacagtccatcggcgcgccgctgttccgccagattgaagagagcggcgccgacattgtcgtcaccgattgtgaaacctgtaagtggcaaattgagatgtctacaagcaaacgctgcgaacaccccattacgctactggcccaggcgctcggctaagtaaaaagcgccggagcccctccggcgccattaccctactcaccagggacgattttccatcagacatatacccttcatacttcaagttgcttatgtgttggctacggattattttgggtataaacgcggatgtctctttgcaataacctgccctatttggttaaccatgaccgctaacccacggtggcatgacagataacgacgttactgtttatagagcaatatctcttgtatcgacgcgttaccagccacctttaaagagggggataactgaatatccccaataataattgagtgttatgtgaataataagaaaatcaggtctatgcctgatttaatatatcccccgctaataataatatttttacaaataattatacattacatcatattcgctactttcacttaccaggaaacagagcaaaatgaatatatgtgtaaattcactttaccgattgagcataccgcaatttcacagcttatatacagaagaggtgagcgatgaggcgcttacattgttgtttagcgccgtagagaacggtgatcagaattgtattgatctgttatgcaatcttgcgttacgcaacgatgacctggggcatagagttgagaaatttctttttgatctctttagcgggaaaagaacgggatcatcagatatagacaaaaaaatcaatcaggcttgccttgtattacatcaaatcgccaataacgatataacaaaagataatactgagtggaaaaagctacatgccccttccagattactttatatggcaggttccgcgacaaccgacctttctaaaaaaataggaatagcacataaaattatgggcgaccagttcgctcagacagatcaagaacaggtaggagttgaaaatctttggtgtggtgcgcgaatgttgtcgtcagatgagctagcagctgcaacgcaaggtctggttcaagaatcacctcttctctcggtaaactatcctattgggctgattcatcctaccaccaaagaaaatatattaagcactcagctacttgaaaagattgctcaatcaggattatctcacaatgaagtcttcctggtaaatacaggagatcactggcttctctgtttattttataaacttgcagaaaaaataaaatgccttatatttaatacttattatgatttaaatgaaaatactaagcaagagattatagaagcagcaaaaattgcaggcatatcagaaagcgatgaggttaattttattgaaatgaatttacagaacaatgtacccaacggctgtggtctattttgttaccatacaattcaactcttatcgaatgccggacaaaacgatcctgctaccacactacgagaatttgcggaaaatttcttaacgctttcagtagaggaacaagcactatttaacacccaaacccggcggcaaatatatgaatacagtctccagtaatggtgagtacttagagcctatcccattaggctcttatcctgaaatgatgctctgcgaagaatttataagtatataagggtgggaaggccaggccttcccactaaaagttctatgccgtcaatgattcaaccacgtctatccagccatgctcgctggtaatgtcctcgccattaagccaacggcgcagcatatttagcgccatcaccgcacaaacctcctgacgtattgccagactataccgataggcgctaaaacgcatgcgtaaggcatacgtgccatccggcatttttctcaataactacgttttgccgtgcttactgactgaacagatttaaacatcgccaacctgctgtccagcgcctcggtgtagagcatcgtatctaccccgaccgcgacaaaattcgcgccccacgccagacatttctgcgccattgccggatcgaccgccaaaaaacccgccgcttttccggcggcgcgaatacgataaatacacgcttcaatgattcgctgcacttccgggtgtccggcattatcggggtaacccaatgaagcagagagatctgccggaccgataaagacgccatcaatgccttcaacctccagaatcgcgtcaaggttttccagcgccactttgctttcaacctgcaccaacaggcagagcgactcattggcctgtgccatatagttgtcgattctcccccagcgcgccgcacgcgccacgctcgcgccaacgcctcgttgccccaacggcgggtatcgggtagcggaaacgacctggcgcgcctgttctgcggtgtcaaccatcgggatcagtagcgtttgcgccccgatgtccagtacctgtttaatgagcgctttacttccctcgatcgggcgaatcaccggctggctggcgtatggggcgatggcctgtaactgatgatacaagtcctgcaccgtattaggcgcgtgctcgccatctattaacaaccagtcataacccgacgtcgccgcaatctccgccatataagaggtggttgaactgagccacaaaccaatttgcgtatcccctttacgtaatccttctttaaaaggatttgataacaatgcgttcatagcgatccttacaacgtagataagattaatgatgcgcagcgccggattgcgccaccggacgattaacgctcagcgtgaagataattaatgagccaatgatggcgactccggccagcgtcagcaggcccgccgcatcgctggcaaacaacgtttccgcttttacgcgcagaattggggcaataaaaccgcccacagcgccaaacagattaacgaaaccaattcctgccgccagagccgtaccggaaagtagctgcgttggcatggtccagaatacgggctgaacggcaataaatcctactgctgcaacacagagcgccagaatagcgagcaccggagaaaccagacctgacaggccaatgccaatgcccgcagccagtagcgtcactgccgcaacgttacggcgatcgccggtacggtcggagtagcgaggaataagccatgtgccaagcaaagccgccacccagggaaccgctgttaccaccgaagcggtaaagcccactttagtgcccaatagcgcggcaacctgggtcggcaggaaaaagatgagtccgtataccgccacctgaatcgtcagataaataatagccagttgccagacgcgtccattacgcagcgcatccgcaagccttgacgtgacctttttctcttcttcgctcgccagttgcctgataagcgcgttcttttcttccaggctaagaaaacgcgcctgctgcggagtgtcatcaagccagaaaaaggtgaatatccctgcgccaatcgccagtaggccttcgataacgaacatccagaaccatcccgggtgccccataaaaccatgcatctccagcagagcgccggagagcggcgaacccaacgttaacgccagcggcgcccccatataaaatagccccataatgctggcacggttacgctgcgggaaccattgtgaagttagatagatcatgccggggaaaaatccagcctccgccgcgcccaatagcgtgcggattatcagaaattttgcttcactatccgcccaggccatcgcagcagagagaaagccccacagcagggtagtcgtgccgatccaggttcttgcgccaaatttgcgcatcagcaggttagccggtacgccaaggaaagcgtaaaccacaaagaaaataccggcccctagcgcgtaggcttcattacttagcccggtatctatctgataggtctctttggcaaaaccaatatttgaacgatccagaaacgccagtacatacagcgccaacataaaaggaattaaacgtgcgcggtttttcttcactacgccgtcaagtaaagtgatgctcatagcaatatcctcaacaggatgagggcgttgccgtacaaaggcaacgcacgagttattagtggctataagggcgtttcaagtgacagtcacggttaagctcgacgccgaagcccggcttatccagcactgatttatggatgcgtccattcaccggcaccggctcatccaggagaatcgggtcaaattgcggacgcagagtggagcagtccgggctggtcatcaggaactcgctgaaaggggtattagtgaaagtaataactgcatggtgcgaatagacagacgaaccgtgcggcaccaccagttgcccgcgcgatttggcaagcgcggcgatctcaaccagcgtggttaatccgccgcaccagccaacatccggctgcataatatcaatgccggtttctgccagagtgcggaaggattgcagcgtaccatggtgttcgccgctggtaaccatcatccctgcaggcgcgttgcgttttaattcgcgatagccttcatactgctgcggcggcagacactcttcaatccatttgagattaaatggcgcacaggcgtgagccagtttagtcgcatagttcacatcctgactcatccagcagtcgagcatcagccagaaatccggcccgcacttttcacgcatatccgccaccatcgcggcatctttacggatccccgcatcaccatcgtgcggtccccagtgagtcggcattttaccgccgataaagcccatttctttagccagatccgggcgtgcgccggtggcgtaaaactgaatttcatcgcgcaccgctccgcccagcaatttataaaccggcagcccaaccaccttgccaaacaaatcccacaacgccagatccacacaggaaatcgtgttcatcaccagaccgccggaaccggagtagtacatggtcgcgccgagcatctgatcgtgaataagtttgatatcgcttacgcatttgccttcaataaaccggttaagatgtttttctacgataaaacagcccatctcccctgctgtcgaaacggcgaaccccgtctgcctattttccgcctctacttcgacaatcagcgtccctaacacgttgatcccaaaagactgacgagactgctcatagtcgcgatatttgctcatgggagtggcgatatggtcatcaatccagtgatttcctccctggtcgtgataatccccgccgccagcccctttctctgcggtagcgcccccaataaaccaggctcgaacgtgtttaattttaggaagagtcataatattctccattttaagatgcgagtgagtcgaagggacttttccatcccaacaggcgtgaaatatctttggcacaggcaatagctttaccggccaaataatctagattctcttcgttgatttgcaggcgcgtgccgaccactgaaattgccgcggtcagttcgtttctggcattaaataccggtgcggcaacgcagcggacatccggataatcctccccgttatcaaagctccatcctcgctggcgaatgcgctccagctcatcattcaattgttgcggctcggtgatggtggtcagcgtggctcgctcccataccagttgttcaataatggctttgcgtacggcggccggctgccatgccagcaggcatttgccgatgccggaacgataaagagagaggcttttcccctcatgcgagcgcacgctgatagtggatgaggattccactttcagtatgtaatacgcattttcgtggtcgatgatccccaagtgacacagcagcccggtttcatccatcagttgtgttagacgaggacgcgccagctcccgcagatccatcttgctgagcgcatgacccgacaattcaacgagcttagtccacaggcagtagttatcctgatgatcgaggctaataaatcgctgacgttttaattcattcaacagcaggtacgcggtgctttttggaatacgcagcgtttcaataatgattgccgcgctgcatgggccaatacgcgcgatcaaattgaggatgtcgattgcgcgagtaagagccgggactttacttgattccaacatattggactccagtctgagacactggaatcagtgtgaaaggtcagtagggaaaaaattgtgaagcgcgtcaaagcttatccgccttccaacggagtggaagggttaaccatataaatgtgaattaacgcacgtattactttgtattcagtacaattggctggacaaaaaagcagatgatattgccggataatggcatagcggccttatccggctcacgatgtcgttcccatcgcagataagagaaagggattatgatgtcaatgattcaaccacgtctatccagccatgctcgctggtaatgtcctcgccattaagccagcggcgcagcatatttagcgccatcatcgcgcagacctcctgacgtattgccaggctataccgattggcgctaaaacgcacgcgtaaggcatacgtgccatccggcgtcgccagcgcgaaattaagatgttcgttttccagccccgacacggccagcgccagaccggcataatgattgctgcgccgttctgtcgtccagtgtgccgtttgcgccagcgtctcttcctgagaaggaacgacttcgctggcaagaacaggcgccccggcgcgggaaagctgtagcgccagtaagccgctggtgtattgctcgctcaacgtcagactcaactgcctttcctgcaggcggcgggctatttgcgccggcaggttttccgtaccttcaaaaatcaggttctgcccggcaacccgtttgacctctggccataacgccagcatcgcctcccgttgcgtcgccgggccggtcaatttcagttcaatgatcggcattgatgagcgataccccatcgtcacgccgggcggcaacggcagtgaatcgagacgctgcgcgaggtcactttctgaacgtccaaaagtcgttaaccgcaggcaaagcggcggctccggcagcgaaaaacgcgcgcgtaaccgcggtaagatttccttctccaccataaccttaaattcagacggtacgccgggggtgaaaaacatcaggcagcggttgagctgtagcgcaaatccacaggcagtgccgagcggattattaataaactccgcgctggcaggcagttccgcctgtttacggttgctcggcgccatcacgcggccacgctgctgaaagtagcgttccatttcggtcagccacgcctggtgcagtactaatccttcgccttttgccgttgccgcggcgagcgcgcttaaatcatcgctggtcggccctaacccgccattaacaatcaaaacatcagcatgttgactgcgttcacgcaagatagcgaccagactgtccagattatcgcctaccgtatttcgccgtgataacggaacgccctgatgaaagaaaaaatcagccagccaggcggcattggtgtcaacgatttgtccgtgcaacacctcatccccggtggatagcatttccacatttagcattgtgttctcctgctcttatgatgaaaacactataacgcaaagacgaatatgacgtggaaagaagaatgacgggaacaggaggaatatggcgcgacgattgccgcgccgttagcatcaaaagctggcgtttacgccaacataagggccgtcagcaatcgcattatcgcggttgccgtctttacccgccaggttcaggtaacgataaccggcttcaatgctcagcgggcgcataatggtgaaacgcgcgcctgcattcgcttcttcataactgtcgataccgctggacagcgaatctggtgaataataatactcgccgaacagacggaagctgttgccgattttccattgtagcccaccgccgacagccgccgcatagccttcatcgctgtctttcggattggtataaatacctttaccgccgaccgtcgccagcagcggtcccaccggaatgttcagccccagacccacgcccgcagcatcgccatcatcatcgttgtgcatccagttgccgcttagcgccagtcccgtcgattccgtaccaaaacccacgccaatgttggtgtaatcttcgcccgcctggccgctaatactgatggcctgcgccgatgcagaaacgaacagcattccggcaaaacctaataatatgctttttttcatttttaccctttccagcaagcacataaagaaaaactccccaaaacggcagaattgtactgccagacgctgaggaatcaatgcactaagaaaccattccaaaaacatattgtaacgaaatactactttcgccatgacgcatcattgcgccatcacatggcgacgcctgcatcaacaaaattaacaaaaaacgcagtctgcgttatcgcttccatttttcacaaagaatttcgcagaatgatttgttaagctgatggcctggtggtttaaggaagcgacttatgcgtcaacgaactatagtttgcccattaattcaaaatgatggctgttatctgctgtgcaaaatggccgacaaccgcggcgtctttcccggtcagtgggcgctgtcgggcggcggggtcgagccaggcgaacgcattgaagaggcgctgcgtcgggagattcgggaggaactcggcgaacaactgattctgagcgatattacgccgtggaccttccgcgacgatatccgtattaaaacctacgctgatggcagacaagaagagatttatatgatttatctcatcttcgactgtgtttccgctaaccgcgatatatgtattaacgacgaatttcaggactacgcctgggtcaagccagaagaactggcgctgtatgatttgaatgtagcgacacgccacacattagcattgaaagggttattataatgacgacagccgcttcaggctgtctttacgcttttaacatgcggctagccgggaacaaattcaccatctaaaaagagttttccgttttccgcatgcataacgagcgcattaagatagtccggatcaaactttacgccgcgcttattttttgcaatatacgtcaaacaatgattatgggtaaaaatgactatatttttattctgcgactttttcagtaacgtattgattgaagcataaataccgctgccgcaatccatcatttttttatccaccgtaagcgacctgcccgcagaaaaccaggttgccgactggatggtgcgcaccgtattactggaatagagattgtaattttgtatatcggcactgaaggctttacccagcgctctggcatcttgcgcacccttgaccgtaatccccgtgctgtctgacaggcaggtattatcggaacgatcgcaccgctcggcatggcggaataacacgactaccggatgctgcttcgccagcgccgccagcgctttaccgttaatctgcggtagaccgttaccactccaggcatgttgtgaggtcaacccggcgataataaccaacgcccccgccagaatcgcgaaatagcgtttgtttttaataaagcgtagggtaaatgccagcacattaacctctcaggcagacagtgcagctaacttaatagcaatacaattaaaatgaaattccgcaacggaagaccaggccagaaacataaaaacagcttttgggcatgcataaaatgccttaaactttcggcgaaagcaaagcataattccgttaaaaattatctttttacttcaccttaatttcttaatgttaatttaatcttcatccagtagggttcagctaaatgcgttaaaaaataagcccttttctattgccgaaatatttgaaaagcggctttcaatggctgaaggaaaaatgatgtcggactttttgcctttctcccgtccggcgatgggcgcggaagagcttgctgccgttaagaccgtactggactcaggttggataacaaccggcccgaaaaatcaggaactggaagcggcgttttgtcggctaactggcaatcaatatgccgttgccgtcagttcagccactgccggtatgcacatcgcgttgatggcgctgggcattggtgaaggcgacgaggtcattacaccgtcaatgacgtgggtttctacgctaaatatgatcgttttactcggcgcgaaccccgtcatggtcgatgtcgatcgcgatacgctgatggtcacgcctgaacatatcgaagccgcgattacgccacaaaccaaagcaattatccccgtccactacgctggcgcgcccgccgatctggacgctatttacgctcttggcgagcgttatggcattccagtgattgaagacgcggcgcacgcgacaggaaccagctacaaaggtcgccacattggcgcccggggcaccgcgattttctccttccacgccattaagaacattacctgcgctgaaggcggtatcgtcgtcacggataacccgcaattcgccgataaactgcgcagtctcaagtttcacgggcttggcgttgatgcctgggatcgacagagcgggggacgcgcgccacaagcggaagtcctggcgccgggctacaaatataatttgcccgacctcaacgccgctatcgcgcttgcccagttacagaaactggatgcgcttaacgctcgacgcgccgccatcgcagcgcagtaccaccaggcaatggcagacctgccttttcagcctctgagccttccgtcgtgggagcatattcacgcctggcatttattcattatccgggtcgatgaagcccgctgcggtattacccgggatgctctgatggcatcgctgaaaacgaaaggcatcggcacagggctgcatttccgcgccgcgcatacgcaaaaatattatcgcgaacgtttcccaacgctcacgctgcctgacaccgagtggaacagcgagcggatctgctcactgccgctcttcccggacatgaccgagagtgactttgatcgagtcattaccgcccttcatcagatagcaggacaataagcatgtttgacgccgcccccataaaaaaagtctcggtggttattcctgtctataacgaacaggaaagcctgccggaattgataagacgcaccaccaccgcctgcgagagcctgggcaaagcgtgggagattttattgatagatgatggtagcagcgatagctcggcggagctgatggttaaggcgtcccaggaggccgatagccatatcatctctattttactcaaccgtaactacggtcaacatgcagcgattatggcggggtttagccatgtaagcggcgatcttatcattacgctggatgccgatctgcaaaacccgccggaagagatcccgcgcctggtggcgaaagccgatgaagggttcgatgtggtaggcaccgtgcgccagaaccgacaggacagcctgtttcgcaaatcggcgtcaaaaatcattaatctgctgatccagcgcacaacgggcaaagcgatgggcgattacggctgcatgttacgcgcctatcgccgccctattatcgatactatgttgcgctgccatgaacgcagcacctttatccctattctggccaacattttcgctcgtcgggctaccgagatcccggtgcatcacgctgaacgtgaatttggcgactctaaatacagttttatgcgtctcattaacctgatgtatgacctggtgacctgcctgacgacgacgccgctgcgcctgttgagtctgctgggcagcgttatcgccatcggcgggtttagcctgtcggtattgcttattgtacttcgcctggcgctggggccgcagtgggcggcggaaggcgtatttatgctctttgccgttctgtttaccttcatcggcgcgcaattcatcggtatgggactgctgggcgaatacatcggtcgcatttataacgatgtccgcgcccgcccccgctattttgttcaacaagttatctacccggaaagcacgccgtttactgaggaaagccaccaatgaaagccgttatttttgcctatcacgatatgggatgtcagggggtgcaggccgtactggatgccgggtatgagattgccgcgattttcactcatgccgacaatcctgcggaaaacaccttttttggctccgtctcccggcaggcggcagaattagggattccggtttatgcaccggataacgtaaaccatcctatctgggtcgaccgcatcgctgagcttgcgccggatattattttttcgttctattaccgcaacctgttaagcgaagaaattctgcacctcgccccggctggcgcgttcaatctgcacggttctctattgcctgcctatcgtggccgtgcgccgctaaactgggttctggttaacggcgaaagcgaaacgggcgtaacgctgcatcgtatggtcaaacgtgccgacgccggagagattgtcgccagtcaacgcgtcgctattgcgcaggacgatgttgcgcttaccctgcatcataagctatgtcaggccgcgcgccagttgcttaatagcatcctgcccaccatgaaatgcggcgatataccttctgttccccagcgtgagtctgactctacgtattatggtcgccgcaggccggaagatggccttatcgactggcacaaaccggtttccacggtgcataacctggtgcgggcggtagccgccccctggcccggcgcgttcagctataacggctcgcaaaaattcactatctggtcttcccgaatgtgtccggatgcgcaaggcgcgcttcccggctcggtaatttcggtctctccgctgcgggtcgcctgcgccgatggcgcgctggagattattaccggccaggccggagacgacattactgtacagggctcgcagcttgcacagacgcttggtctggtggcgggcgcgcgtttgaaccgtccaccagcgaccagcggtaaacgtcgcattcgcgttctcatcctcggcgtcaacggttttatcggcaatcatttgaccgaacggttactgaatgaagagaattacgaggtctacggtatggatatcggcagcaacgccattagccgattcctgctccaccctcgatttcatttcgtggagggagatatcagcatccactcagaatggatcgaatatcatgtcaaaaaatgcgatgtcgtactgccgctggtagcaattgcaaccccgattgaatacacccgcaacccgctgcgcgtctttgaacttgattttgaagaaaacctgcggattatccgttattgcgtgaaataccgtaaacgcgtggttttcccgtctacctctgaagtgtacggcatgtgtacggacgcctcttttgacgaagacaaatcgaatctgatcgtcgggccggtgaataagccgcgctggatttactccgtttccaaacagcttctcgaccgggtgatttgggcttatggcgaaaaagagggattgcgcttcacgcttttccgtccctttaactggatggggccgcggctggatagcctgaacgcggcgcgtatcggcagttcacgcgcgataacgcagttgattctgaacctggtagaaggaacgccgatcaagcttatcgacggcggtcagcagaagcgctgttttaccgatattcgcgatgggatcgaagcattattccgcattattgtgaatgatggcgatcggtgcgatggcaaaatcattaatatcggcaatcctgacaacgaagccagtattcaggaactggcgacgctgttgctcgacagttttgataagcatccgctgcgctgccatttcccaccgtttgccggtttccaggtcgtcgaaagccgtagttattacggcaagggttatcaggatgtcgcacaccggaaacccagtatcgacaatgccaggcgctgtctgggctgggagccgtctattgcgatgcgtgatacggttgaagaaacgctggacttctttctgcgtagcgtcgatatcgcggaacgcgcatcatgacgaaagtcggtttacgcattgacgttgataccttgcgaggaacgcgtgaaggtgttccccggctgctggcgacattgcatcgccacggcgttcaggccagctttttcttcagcgtcgggccggacaatatgggacgccatctttggcgtctgataaaaccgcgatttttatggaaaatgctacgttcaaacgccgcttcgctctacggctgggatatcctgctggccggtaccgcctggccgggaaaaaatatcggcaacgctaatgccgggattattcgtgaaacggcaacataccatgagacgggactacatgcctgggatcaccatgcgtggcagactcacagcggccactggagtatccgccagcttgaagaagatattgcgcgcggcataacggcgcttgaggccattatcggaaaacccgtcacctgctcagccgcggccggctggcgagcggatgggcgcgttgttcgtgcgaaggagtcgttcaacctgaggtataacagcgattgccgtggaaccaccttattccgtccgctactgatgccgggccagacagggacgccgcaaatcccggtcaccttacccacgtgggatgaggttatcggccccgccgttcaggcgcagtcgttcaatacctggattatttcccgtatgttgcaggacaaaggcacgccggtatataccatccatgcggaagtagaaggtattgtccatcagccgctgtttgaagatttgctcgttcgtgcacgcgatgcggggatcaccttttgtcctctgggcgaactgctgccggcatcgcctgagtctctgccgttggggcaaattgtacgtggacacatccctggccgtgaaggttggctggggtgtcaacaggcagcgagcgcctcatgatgaaatcgatacgctattatctggctttcgccgcgtttatcgcgctctactatgttattcctgtcaacagccgcctgctctggcagccggatgaaacgcgctatgccgaaataagtcgggagatgctggcgtctggcgactggatcgtgccgcattttctgggattacgttattttgaaaaaccgatagccggttactggataaacagtctgggtcagtggctttttggcgctaccaattttggcgtgcgggctggcgctattttaacgacattgctggccgcagcgctggtggcatggctgacgttccgcttatggcgggataaacgtaccgcgttgctcgcctccgttatctttctctccctctttgccgtttacagtatcgggacgtatgcggtactcgacccgatgatcgccctttggcttacggccgggatgtgttgtttctggcaggggatgcaggccacgacccgaatgggcaagattgggatgtttttgctactgggcgcaacctgcggtctgggtgtattaactaaaggcttcctcgccctggccgtacctgtggtgagcgtgctgccgtgggtcattgtccagaaacgctggaaggactttttgctttacggctggctggcggtcttgagctgctttgtggttgtccttccctgggcgatcgccattgcgcggcgcgaagccgatttctggcattactttttctgggtggagcatatccagcgattcgccatgagcgatgcccagcataaggcccctttctggtactatctgccggtactgctcgcgggaagtttaccgtggctggggttactgcctggcgcgcttaaactgggctggcgcgagcgaaacggcgcattctatttgctcggatggacgatcatgccgcttctctttttcagcattgcgaaagggaaactgcccacctatgttctttcctgtttcgcaccgatagcgatactcatggcgcgcttcgtcctgcataacgtaaaagaaggcgtcgccgcgctacgtgtcaacggcgggatcaacctggtgttcgggttagtcgggatcgtcgcagcgtttgtcgtctcctcatggggcccgctgaaatcgccggtgtggacgcatatcgaaacctataaagttttttgcgtctggggcgtctttactgtttgggcgtttgtgggctggtatagcctctgtcatagccaaaaatacctattacccgcgttttgtccgctgggactggcgctgctgttcggcttttccatccccgacagggtgatggagtccaaacagccacagttttttgtcgaaatgacccaggcgcctttggcatcaagccgctatattcttgccgacaacgtgggcgtcgccgccgggctggcctggagtctgaaacgagacgatattatgctctacggacacgcgggcgaactcaggtatggtcttagctatcctgatgtgcaggataaattcgttaaagccgacgattttaacgcctggctcaaccagcatcgtcaggagggcattattacgctagtactttcaatagccaaagatgaagacatcagcgctctttcccttccccctgcggacaatattgattatcaggggcgtctggtgttaattcagtatcggcctaaatgatcggcgtcgttctggtgcttgccagtctgctcagcgttggcggtcagctctgccagaagcaagcgacacggccattgacggcgggcggacgccgccgtcacctgatgctgtggctgggcctggcgctgatatgcatgggcgcagcgatggtgctgtggctgctggtgctacaaaccctgccggtgggaattgcttacccgatgttgagtctgaattttgtctgggtcacgctggcggcctggaaaatctggcatgaacaggttccgccccgccactggttgggcgtcgcattgattatcagcggcattatcattctggggagtgcggcataatgggcgtaatgtggggactgataagcgttgcgattgcctccctcgcccagttgagtttaggattcgccatgatgcgactgccatcgatagcgcatccactggcgtttatttccgggctgggcgcatttaatgccgcgaccctggcgctattcgccggtttggcggggtatctggtttccgtcttctgctggcagaaaacattacacacgctcgcgctcagcaaagcctatgcgctactgagtctcagctatgtgcttgtctgggtagcctcaatgctgttacccggtttgcaaggcgctttcagcctaaaagcgatgctcggcgtattgtgtattatggcgggggtaatgctgatttttctgcccgccagatcatgatggcttgcgcgtcaaccgctgccattcgtcgcaggaataacagcgtgcatcaacgatttttaaggtctggtgtttttcccgattaatacaatactgcgcatcctgtaaaggcgacaggatatcgccgggactcagtaatatcatggaattcgcctcggcgatcatttttagcgaaccgccgctatcgcacagcaccagaacatggcacgccctctttttgacataatgcgatttcttaaccaaccattccatagcgcccccgtttcacgctgattgttcataacacgttacacatcaacggataaacaaaacggcaatagcgatggaatggttgtatattaacctaacattaatttttacagttctcacacacccactgctggagcgcacggcgagatattttaatccctccgtttttcagttctgacggcatcgtcaaccagcgaaccggctgttgaaaacgcgccagcttatcacgaacccattcagcgaggttcacgtctccggcctgcgatgcatactccacaaccgcaacgggacgatgaccaaactctttatcttctaccggcacgacgaaggcttgttgcaccagcggatgcgcattaataacgcgttcgacttcctccggctgaatgccttcgccgccgctaaagaacaggttgtccagccgcccggcgatggttagcctgccgtggttcagctcgccgcgatcgcgcgtggcaaaccagccttcgtcattaaccagcgggatcagtttgccatcacgccagtaaccttccgccatactggcggcgcgcagccagacttcattatcgacgattctgatctctctgccgggaagcggcgcgccaacatcatccgaaccatcggcctctttggcgcataccgtagacgcgaactccgtgagcccatacccgcaccagcagcgaatcccttgtttgctggcctggtcggtgagttcaaccggaatcaccgcgccgccgagcaaaacggctttcagcgtcaccgccgcccgattcgccagcagccgccacagctgcgtcggcaccagcgaagcatgagtacaccctgccagcatctgctccagcggttgcttatcgcgtaccgtcatgcgcgccccggcgaagagccaacgccacataataccctgcccggatacatgaaacagcggcagcgatagcagccagtcatcctgagggccaaacggcattagcgaaagcaccccctgcgcgctggcaagatgcgcctggcacgtatgtacagccgcttttggcaatcctgtggaacccgatgtcagcgtcatggaaaccagacgctgcggttgccaggccacagcatacgccgctgtactcttttgtatctgcaacgcggttaatccagaaaacgcattttcgccttccagtgtcagcgcaaaacgcagcgttaacttcggcaccagcgcctccagcaatgtctggggcaactgcgggttgacgggcagaacccgcgcgccgcactgcatcagcgcaagccatgccaacagagtgcgcggctgattcccggcgcgcagcaggacaccatcgccctcgcgtacgccctgcgcggcaaacccgcccgccagcacatcaatacgctcacagagggcgcgccagcttagcacttcatcgttcaggcgcagagcgggcgcctgactgcgaacctgacgccagtggcgccacggccaatccgtgaatgtcataacagtcgttccagctcctcacgcttcagacaaggcaacgcgctaccgggccaggggcgaatctgttgcgcctgcatcagatgcaaggtatccagtccaggcagcgttcccggcgtcaaccaggcggcaatccgcgccagttgcgtcaggccgaggctggactcgatcgaagagctgatgaccgccgtcagtcccaacgcatgggcggcagcgacttgctcacgcactttatcaagcgatccggtcagcgtaggtttgataaccacagccctgacgccctcttcggcttcaaaggtgaaatccgcttcgcgcagactttcgtcccaggcaatcgcgatgccggtttcacgggcaaaggcgcgggaatcatcccgcgtcttacacggttcttcgagaaaggcgatacgagcgcggtaatccggattaacatactttgcaaactgttgggcttttagcggcgtccaggcgcgattcgcatccagacgcagatgcagatccgggatcgcctccagcagcaaattaaccaccatgccgtcgcgtaccgcttcataaagacccactttgaccttagcgattttctcgccgggcatatcggcaagccgcagcaccaaatcgtcaggatcgccagtgcataacggcgcggcgcgatagtccgccgcctccggcaagacgccagtcagttccgccagcgcgcagcttgcgccaaacgcgaccgaaggcatctcgggtaatccctcgctcccctgaagccagtcgttcacccatgttagtagcgccgtctgcgcctcttcccacgtttcctgactgaagcccggcagcggagagatctctccccatccctcacgctcgccgtcacgcagacaaacatacagcccgtcgcgagtttttaaccgcctgtcgcgcagaaccacccccgcgtccatggggatctgccagcggtatacctgcgcgctacgcattatgggttccgtttgaatttgctgaagtcaggctgacgcttctggttaaaggcgttacggccttcctgcccttcttccgtcatgtagaacagcatggtagcgttgcccgccagctcctgcagcccggcctgaccgtcacaatcggcattcagcgccgctttcaggcaacgcagcgccatcggactgttttgcaacatttcgcggcaccagcgcacggtctctttttccagatccgccagcggaacgacggtgttaaccagccccatgtccagcgcctgttgcgcatcgtactggcggcacaggaaccagatttcacgcgctttcttctgaccaacgatacgcgccatatacgaagcgccccagccgccgtcaaaggagccaactttcggaccagtctggccgaagatggcgttttccgccgcgatggtcaggtcacacatcatgtgcagcacatgaccaccgccgatggaatatcccgcgaccatcgcgacaaccggttttggacaggtgcgaatctggcgctggaaatccagcacgttcaggtgatgcacgccggagtcatcctgataaccgccgtaatcgccgcgcaccttctggtcgccgcccgcgcaaaacgctttatcgccttcgccggtcagaataatcacacccacgttgtcgtcgtaacgggcatccgccagcgcctgaatcatctctttgacggtcaacggacgaaatgcattgcgcacctgcggacgattaatggtgatttttgcaataccgtcggtggatttttcataacgaatgtcggtgtaaccctccgagcagtcgtgccattctaccggtgcgtaaagcattgtttcatcaggatagatcatagtgtgtcctttagtcagagacgcagaatctgagccagactgtctaccacgccagcggggttttcccgatgcgcgttgtgtccggcgttacgaatgacatggcatgtcgccgccacttcctgcgccagggcgcggaatttgctgtcgcgttcgccacataaataataaaacggaaatgccagcgcgttgagcgcctcgcgtaaatccggctggacggcaagcgatgtcgcctccagcatcgcagccagcgtttcgccgttattctggctacgcagcgccgttagcgcctgtctttgctgcgccgtcagcgaggcgaacaccggctgctgataccagtcgtgaaaaacctcagtcaatggttcatgacgaaaacgctctgcccagcgcccgtcggacaatcgtctttcagcgcgcgcctgttcattttgcagccccggatgaccgccttcaaccaccaggccgcacaggccgggtattccctggcaggctgccatcatcgccacccggccgccaagagagtatcccaccaaccaaaactttagtatgttgtaactaattaacgtagcgcgcagcaatctgatgacatcggcaaatccgtcgaccggaatagccgcagatccgccatgtcccggtaagtcaatatagagccgcgaacagccgtgaaactgttcgccaaccggctgccattcgtggcaatcgccagaaaaaccgtgcaggaaaaccagcgagggcgtcccaggctgtccgggcatgtgctgcgcgtgcaacatcatagatggcttacctgagccaaaagttgctgcaacgtctgcgcgccgtccgtatcgtttaccaccagctcaatcaccgttgtcgccggggttcgccacgcgccagccagcgcagactccagttcttcccagttttccgggcgatgatagcgcaggttaaacatggcggccgcatggtcaaaatggacgttttgcggcatcaaataaaagcgctcacgtttgctttgcggcgtcggcagcagggagaagatttgcccgccgttattgttgaccacaatcaacacaaacggcgcggatacctgacgtagtaacgccagcgcgttaagatcgtacagcgcggataaatcgccgacgatagccagcgtcgatttagcgctggcgcgctgcacgcccgccgccgtggaaagcaggccgtcaatgccgctcgccccgcgattgctgtataccggatagccagccggcaactgtgacagcgcgtcgatcagacgcaccaccagactattgcccacgaacaattgcccctgctccggcagatagtcgcggatacggtgcgccagctgcgcttcgccaaaggtgtctcgctgcgcgaccacccgttgccacgccagttccgccagacgcgggatctctacacaccacggtttacgtttttccgccggatgcagttccagccaatcggcgattttcgctaccagtctgcgtccacgatggtgcgccgggtccagacgaccttcaatattgtcgattacccagtactcttccggctcgcaggttgcctgccattgcagtaagcgttttccggtaaggctactgccaagctggacgacaatctgcgcctgctgcagttcggtcaccgctttggcgttgccgagccacaggtcggcgcacggcagcggctgcccggtttgcgacaatacgtcgccaattaatggccatcccagagtttgcgcccactgcgccacttttttgccttcttccgcgctcatacgcccggcgacgacaacgccgcgtttttgtcgccagaagaaccagtcgcgctgtttgtcgctttccagtcgacgcgcttcgcgcagccagggtttttcatcctgccaccagtcgccgagacgctgctgccagaccagaccggtatcattcatatcgccatacagcggttcggcaaaaggacagttaatgtgcagcgcgcccgcatgaagcatggcgagcgcattgtcgatggtcgacaccagccagcgcgccggaatatcctgcgtgggacgcggcaacgacaaagtttgggaggggtgcgaggcaaacatccccgcctgacggatcgcctggttggcgccgcagtcaatcagctctggcgggcgatcggcggtaagtaaaatgagcttctcgcccgtcagccccgcctcaatcaacgccggatagaggttcgccacggcggtacctgaagtgacaataacggcaaccggctgttggctgactttcgccagccctaacgccagatgaccaagcccacgctcatcaaagtgcgtatggtgaataaaagcaggattctctgccgccgccaacgtgagcggcgtggaacgggaaccaggggcgatacaaacatgcctgacgccatgacgggttaaggcttccaggatgaccgccgcccagcgccggttaaatgcacttactgacatgagtttgtccggtatcaatcattgggactaagtataaagagctgcaaaaatggattattgatatgggtcgggaatatgtgactcattacgcatccatctgcaataaggtacgtaacccggccgctttattatctatttcctgccattcctgttccggatcggagccgcggacgattcccgcgccggcatacaatcgcaccacattggccgtcactttggctgaacgtaacgtcacgcaaaactcactttgccgcgtggagagatagcctgccgacccggcataccattcacgttcgaacggctcatgttgttctataaaacaacgcgcgggttcacgagggatcccggcgaccgctgcggtaggctgtaactggtgcaggcagagcgtgtcgtccgcctgattaagcgccgtccagatacagcggcgcaaatgctgtaccttgcgcagtctgagcacctgcggcggcagcacatccagcgagtgggtgcagttttgcagtcgctggcagatgtcttcgacaaccagcatattttctcgctggtttttatcgtctttcattaaccattcgccaagctgccaggctttatggttatccggatggttcgccaccgtcccggccagcgcttcggtacgcagcgccgtttcacgccgccgccagagccgctccggcgatgatcccagaaaggcggtatcggcggaaaaggccataaaaaagtggtagcagttgagatttaaacgacgactggacgccatcatcgcggcggcattgaccggacgggagaattgtaagtcggtggcccgcgccagcacaactttatcaaacgcctcttgcgcaatggtgtgggtggcctgctgaatcagcttcacccaaccgtctttgtccggccagtgttgttcgctcgtgagcgaaaggcgtagcgccggaacaggcttaatgccgaccagagaagcgagaaacgctttcgcctggcgcgcatcatcgcgtagcgaaacgtcactgtgcagatgtaagcgtaaggtcgccgtaccaccgctacgtcgccactccagccgcggcagcaataagtagccctctttcggctcgaacgcattcagcccccaaatacgcaggtcaggctgcgcgtgctgacgtaaaaaccgttgcgccagatcgagcgatgaaaatacggtgatggccccgagaacggcagcttcttcgtcgccattgcgctgttgccagtagaattgcggaaaggatgactggctggccagccagctcaatgcatcgaaggcatcgtttaaagggaaaggcgcatcgaaaacgcaaagccctggcgtcgccggtatctcttgcgatagctgacgcgtcagattttccagcgcagtagtaatagaatgcacgcggaccctccctgttaaaaaccccacattatacggggtactgccctaaaaaagcagtacctcatttagggagggttgcaattctgttcagtggggggatttagcgccgcgccagcagcagtccaagcaccagtcctaccgccgcgcctacgccaataccctgccagggtttttcatgaacgtagtcatccgctttataaacggcctgctttgcccggtaataatagctatccgacgcatggcttacgcggtttttcacctcttccagcgcttgttccgcgcgggctttcagctcaatgtatttttgatcggcgggatcgcctgaggaacgtaaaacctcttccagcgtttcgctgagcaaagtcagatcatcatcaacacgtgattcaccaaattgatatgacattctcattctccgttgtgttaacacctgctcctaactatagtcaacggtttcggtttatgcctgatgaacctcccgcgccattccccggtgcggaatgccgtcttcgtcataaacatcggtgacgggaataaaaccaaaccgcgcataaaaaggttgcagatgcgcctgcgcccccagatatagcggcttatccggccagtgccgcccacaagattccagcgttttcgccattaattgctggcccagtttcgcccctcgccaggcatcgctgacgatcacccggccaatgacaaccgggtctgattcgttatcgcttttcagaatcctcgcatacgccaccagttcatcctgatgccagcccagaatatgccgattgtcgccgactaaatcatcgccatccacatccaggtaaggacagcgctgttctaccacaaagaccgcgcagcgcaatttgagtaacgcgtaaagttgaggaacggtaagttcgctatggtggagatcctgccagtcaatcatgatgcgctcctgtgttgtggtaatcttgggttaaacgataaccaaacgtgtatggacaagatggaattaatttttttaggtacgtccgcaggcgttcccacgcgctcacgcaatgtaacggcaattttattacatctgcaacatccaacgcagccgggagtatggctttttgattgcggcgaagggacacagcatcaaatgcttaataccgcgtttcatcccggtaagcttgagcgcatttttatcagccatcttcacggcgatcatttgtttggcctgccgggtctgctatgcagccggtcgatggcggggaacccccatccgctaaccgtatacggacctcaaggcgtgcgtgagtttattgcaaccacactgcgtcttagcggttcatggaccgattttccgttgcaaattgaagaaattagcgcaggtgatattcttgacgacggtctgcgtaaagtgaccgcgttcaggctggagcatccactggagtgctacggatatcgcgttgttgaacatgacaagcctggcgcgctgaatgccagggcgttaaaagccgcaggcgttacgcccggcccgctgtttcaggcgttgaaggcaggaaaaaccgtcacgcttgccgatggaaggcagatcaatggcgccgactaccttgctcccgccgtggccgggaaatcagtggcgattttcggcgataccgcgccctgcgaggccgccctcgcgctggcgcagggtgtggatgtgatggttcatgaaaccacgctggatgcgtcaatggaggagaaagccaacgctcgcggacacagctccacccgtcaaaccgcgacgctggcgcgggaagctgccgttggtcggctaatcatgacccatattagctcacgctatgacgataaaggctgtcagcgcttactggcggaatgccgcgctattttcccggcgacggagctggcttacgatttttctgttttcccggtttagcgctccattttttgtcctcattgccgataacactaaaaaaggcaggctttcataatgaggttaggatggacaattttcagaaagatattgatgacagggccaatttaaccctgtccaaccgttttgaactgctgttattccgtcttggtacatcgctgcatgaacagaagtcagagctgttcggcatcaatgtatttaagctgcgcgaaatcgtaccaatgcccgcctttacgcgcccggcaggcatgaaagcgccgctattgggcatggtcaatattcgggatcaggtcattccggtgattgatttgccagcggtagcgggctgcaagccggaaaccgggctgaatattttgctgatcaccgaatatgcgcgcagcgtacaggcatttgccgtcgagtcggtggaaaatattatgcgtcttgactggcaacaggtgcataccgccgagaaagccgtcaacggtcgctacatcaccagtattgcctgcctggatgacaacaaagaaaccaacaacctggcgctggtgctcgacgttgagcagatcctttatgatattgtcccctccagccacgatctgcgcgccaccaatctgaagaccaataaattttatattaccccaggcgcggtagccattgtggcggaagactccaaagtcgcccgcgcgatgctggaaaaagggctgaacgcgatgggaattccgcatcagatgcatgtgaccggcaaggatgcctgggagagaatccagcaactggcgcaggaagcggaggccgaaggtaagccaattagcgagaaaatcgcgctggtcctgacagatcttgagatgccggagatggatggctttacgttaacgcgtaaaattaaaaccgatgaacggctgaaaaagatcccggtcgttatccactcctcgctttccggcagcgccaatgaagatcatatacgtaaggtgaaggccgacggctacgtggctaagtttgagattaacgaactctcttcggtcattcaggaagtgctggagcgcgcagcaacaaacagccagggaccactgatcagccgcaaaagcgcctgacgtaacaggggatgcctacagtacaggcatcccctgacgcttagtgagacaagccttccgccagttttaccagtttaataaactccgcgcgatagccttgtctatcttccccgcgcgcctgttcaccccatttaataatttgcggccaggtcgtatctgccagcgtttctgagccacgcagtttttgcccgaaagccgctaccgccgcgcggaaacgaaaatcttcagaggcgtcagcaaagatcggcatctttcccataacgaccgggaactcggctaatgtactttcgctgccctgcggcgctttccagcgcaatttgagccacgccagctcgcttgattttgttgtctttgaggcggctttgttctgagcgtagcgcagtttatccaccgaggctttctgcccgttaagcgtcagttcaaagaatagcgtgacgtgtttacccgcgccgatatcaccggcatcaaccttatcgttattgaaatcctcgtcgcgcagttggcgtttttcataaccaatctgccggtactcagtcacccactgcggattaaattcgatttgcgattttacatctttggcaacggtgaccagcgtttgatgcatctcatccttgaggactttttgcgcctcagagagggagtcgatgtagctgtaattgccgttacccacatcagcaattctcaccatcatggcttcgttgaaattgtcatcgccgacgcccagcgtagataaggtaatacctttctcgcgctctttttttaccagcgcttcgatgtctttgggatcggtaataccgaggttaaaatcaccgtcggtggtcaacaaaatgcggttaacgccgcctttgataaaccctttttcggcctgctcgtaggctagtcgtaatcccgcttcaccaccggtactcccgtaagcatccagattatcaattgccgctttaatcgcggttgtgttatttcccgctgtagacgccagcgcgacgtgagtgccgcccgcgtaggtcacaatcgtgatgttatcctgcgcacgcagatcgttcaccaacagttttagcgccgaccggatcaacggcaggcgttccgctggctgcatagagccggaagtatcaatgagaaaaaccaggttggcaggtggtagatctctggtctgcatgtcccgggcctgaacatcaacttttaatagcgtacgctgcgcgttccacggcgagggagccagttcgtatttaaccgcaaatggcatcggtatacaggccgcaatgggtttagtgttatcctgcttatccgcaacgggctgaggggcgggaaagtagttgagcatctcttctacccgcacggcttccggcggcggcagttgtccctgattcagaaagcgccgcacgttagcgtagctgccagtgtctacatccagactaaacgtggcgagcggcgcctgacttacctgtttaatcggattttcatcgtagtgttcgtaacgcgcggtccccattacattaccgccttgtgcagcgaacgcttttggtgccgcggcacgtgtctgcattacatattgcggtgcttcggctgttgccagagatgccgctttggcatctgccagggctttggcttcagcatattcggctgcttttttcgcagcctgttgggcggcctcggcttgtcttttctggacagtgtcatccccggcctgagcgctattttctttctggatagtccgcttctgttttaactcagccggattatttccctgcgggtcggagggctccggcccacagcccgagagaataaccccacccaacaacagcattaatgtttttccgttaagcatacaaattccttttcaattatattcgggtaattctctgcagatgtcctgcattatattccgcgttacttttattatcagcatgacgaaagtagaaaataattttacctgcgttaatagccaccaataataaaaaagataattatatttttgaggtaaataatatttacgtttaagatgaacggcttaatcagttgctggcgttcgacccacagattctgcgtgaagaacactatttacaggtgaccgatttaccaaaagtgaatatataagatgggggactatctgcactgtgccctcgccgatacttccttttacaacccaccaaacagcaatccattaagccgtgccgacactcacgttattgatggaaagatattatatgctgccgtcacatgaaataatgaactgagcgcgatcggacgccttgaaaaacgctgacagaaatacgcttcagatcaaatttttcccattgaagtcgatgagataaacatttatccgggaaacgggtcacgaaaacagttgggagagttgttccactgcctgatgcaagaaatggacaaactgctgagtttttatcagcgatgcctgagaaatgacagtcacgttataatttttatagcggagtaatgggccatatgtttaacacttcgacaattattgtgaattacccatatgaaaccgctggcgcttacggaaccgcccaacatccggctcttcgttcgtcgggacgtgttgggtttcggctacgcctcacccaacgagtctatggtctctatgcgtcacaggttttcataagttggatgcaatccaacatttagaggctcaggtattgctcatcagcctcaaccgccgataaatcggcggttattgacatcatcaacgcggcattacatcagcggcatcgccagttgcacaaggctaatcagcggctgcggccagacgcccagtaccaacaccagcaacgcggagatcagcaccacgataccgcctgcgctgtactgccagtttgtcggcgcgtcgcgtcccggttgctgcggcgcgtgcaggtagagactcaccgcaacacgcaggtagtagtacaaaccaatcgcggaacccactaccacggcggcgaccagccaccacaggctggcctgaacgccgaccgccagcacgtagaatttgccgataaagcccagcgtcatcgggatacctgccagcgacagcatcatcaccgtcatcaccgcggcaagaaccgggcggtgccagaatagaccacggtaagagtacagagaatccgcatccgggccgcggaacgggctggacatcaggctgaccacgccaaacgcgccgaggctgctgaacagataaccggccagataaacgcctaccgcttccatcgacatctcgccgctctgcagggcaatcagcgccaccagcagatagccgaggtgagagatagaagagtaaccgagcagacgtttgatgttggtctggctcagcgccatcaggttaccgaagatgatagaggcaaaggcgataatgcccagcaccacgcgtaccgcttcgctgtcgcctaccggcgcatacaggaacagacgcatcaccacgccgaagatagcgattttgctcgccgtcgccaggaaggtagaaaccggcgcaggcgcgccctggtaaacgtctggcgtccacaggtggaacggcaccagagagagtttaaagcccagaccgacaatcatcaggccaaagcccgccagcagcaacggctcgtgcagcataccatcgccgaggctcttaccgagcgcttcgaaagacaggttgccggactgcgcatagaccagcgccatcccgaacagcaggaaagacgaggcggcggcggagaggatggtgtatttgatactggcttccagcgagcgtttctggcggaaagcataaccaatcaggccgaacagcggcagtgagatcagttcaataccgaggaacagcgccgccagatggttggcgttcgccagcagaattccgcccaggctggcgattaacaccagcaggtagaactcttcctggttatcgttatagccttccagccacgggtaggcaaaggtacaggtggcgaggctcgccagcagcaccagtccggtgtagagcatcgcaaagccgtcaacgcgcatcagcggcgtgacgtccattgccccggcctggccgacaaaccaaagcgaaaccagagcagcgttaagcccaatgaccgacagcgtggcattgaggaagtgattgcgtcgccacgcaatggagagcatcacaaccaccaccgtcaagccgacgatcagcagcggtagcagcgcaatcaggtgttgtggagttattgtcatggcgatttacggccttgtagtagtaacggaattaacaaaccactgctggatgttgctcatcgcagaatgcgaggtatccagaatcggctgcggatagaagccaagcagtaccagaagcaccaccagcaacagaatgataaacagctcgcgcagcgacatccctggcagttctacactggcaatctggctcttcgccttaccaaagtaagcgcgatgcagcatcgccagcgagtatacagaggcgaataccagcccaaaggtggagatcacggtaatcaccggcaccacctggtagctgccgaacagaatcataaattcgccgacaaagttaccggtgcccggcatcccgagcgtcgccaccgcaaagaacatggacagcgcaggcaaccatttcattttgccccacaggccgcccatcatacgcatgtcacgcgtatgcagacgttcgtacaactggccacacagaatgaacagacccgccgcggacaaaccgtgcgcaatcatctgaatcaccgcgccctggtacgccagctgactgccggtgtagatagcgatcagcacgaagcccatgtgggaaacggaggtataggcaatcaggcgcttgatgtcgtattgggtaaaggccatccacgcgccgtagaaaatgccgataacgccaagccacatagcgataggcgcaaactccgccgacgcgttcgggaacaatggcagggagaaacgcagcagaccgtaagcggcggttttcagcaagatccccgccaggtcgacggaaccggcggtcggcgcctgggagtgcgcatccggcagccagccatgcagcggaaccaccggcattttcaccgcgaaggcgatgaagaagcccagcatcagcagatattccacaccgtgggacatcggcgtattcagcagctcttcataattgaaggtccacacgccggtcgcgttgtagtgcacaaagaccagcgccaggatggcaatcaacatcaccagaccactcgcctgggtgtagatgaagaacttggtcgccgccgtgatacgcgttttcccgtcagaagctttgtggccccacagcgcgatcaggaagtacatcggcaccagcatcatttcccagaagaagaaaaacaggaacatgtcgatggccaggaacacgccgataacgccgcctaagatccacatcaggttcaggtggaagaagccctgatatttttcgatttctcgccaggagcaaagcaccgccagaacgccgagcaggccggtcagcaccaccattagcagcgacagtccgtcgagcgccagatggatagagatgccaaaacgcgggatccacggcaggacaaattcagattgccactgcggaataccggcggattgcgtcagtgaatagccgccctgcaaccacaattgcagaccgagcgccagcgtcagccccatggtaatcagcgctatccagcgcggcaccttcacgccaaagcgttcggtctgccagcacagaaagccgccgataaaggggattaatatcaaccagggtaataacatagctaagtatgtcccttatatttactcctgctcaggctatctcactcgtcagcccaaatcctgccagtgctcacacaaaacgcagcgcgttttgaacgtccgtaaggacggccccgtaggggtgagcttcgcgaatcatcctcacgtacttcagtacgctccggttgctgtgcgctggcggtatccggtctgacttcgccgatgacgcctgtacttcaggaacagattttcaacgaattctaaaaattatttttgggtttgtaggccggataagcactgcgccatccggcagtcgttcatccagccaacaaactcaacgcagtaccatcaacagtgccagcacaacgacagcgccgatgctcatggatgccacataccagcgcaaataaccgttctcgctcagtaccaggcctttgcctgcaaaacgggaaaggatagccggaatgttcatcaacgcattaagcgggtcgcgcttcagcagccaggcgataccgaggaatggcttgacgaatactttgtcgtacagccagtcaaagccccaggcgttataccaccaggtgcccagcagacggcccggcgcgctgttggcgatcgacgtcaccagcgtacgtttacccagccacagccatgcggcaatcagaatgccggcaatcgccactacgccagaggtaatttccagcgtcatgacgcgaccatgcgccagttcagttgtctgcggcagcaccccctgcagcggcggcacaatcagcgcgccaacaaaggtagacagaatcatcaggacaatcagcggcagatggtgggtaatccccttccctgcatgagcatgaatttgttctttaccgtggaatacgatgaaaatcatccggaaggtgtacagggaggtcatgaacgcgccgaccagacccgccaccatcagattgatatgaccgttcgccatcgccccggccagaatctcatccttactgaagaagcccgcagtgaccagcggcagcgccgacagcgccgcgccccccaccaggaagcaggcatacaccagcggaatggacttacgcagaccgcccatcttaaagatgttctgttcgtgatggcaggccagaatgacggaaccggacgccaggaacagcagcgctttgaagaacgcatgggtcatcagatggaaaatcgccgcatcccacgcctgtacgccaagcgccaggaacatgtagccaatctggctcatggtggaataggccagcacgcgtttgatgtcggtctgcaccagcgcggcgaaacctgccattaccagcgtaatcgccccgataatgcccaccagatgcagaatttccggggtcatcaggaacagaccatgggtacgagcgatcaggtagacaccggcggtcaccatggtggcggcgtggatcagcgcggagaccggcgtcggaccggccatcgcgtcggcaagccaggtctgcaacggtagctgcgcagatttaccgaccgcgccgcccagcagcatcagcgtcgcccacatcagcatgttgttgccgtcagcaaagtgcgctggcgccagctcgaccatttcgcggaagttcagcgtgcccagttcgttgtagaggatgaacagcgcgaaggcgaggaatacgtcaccgacacgggtcaccacgaaggctttcattgccgccgcgccattcttcggatcgctgtaatagaagccgatcaacagataagagcacaggcccacgccttcccagccgaggtacatcaacagcaggttatcggacagcaccagaaccaccatgctggcgataaacaggttggtataagcgaagaagcgggagtagccctcttctccacgcatgtaccaggacgcaaacatgtggatcaggaagccgacgccggtgaccacagagagcatggtcagcgacaggccgtccagcaccaggttaaaaccgatgttaaagttaccgaccgacatccacgtccacagcggctggctgaacgcctgtttgccgttggcgaagaaatccatcccgacaaacgctgtcaccaacgccgccagaccaacggagcccacgccaatggtcgcggagagattttccgaccagcgtccgcgagagaacgccagcagtacaaagccaatcaatggcagaataatggttaaggcaagcatgttcatccacgcatctcacttactgaatcgatgttcaggttctggcgacggcgatggagttgcagcaacagcgcaagtccaatactcgcttccgcagccgcaaggctgatggcgagaatgtacatcacctgaccatcggtctggccccagtagctcccggcgaccacaaaggccagcgcggaggcgttaatcatgatttccagcccaatcagcataaacagcagattgcggcggataaccagaccggttaaacccaggacgaataaaatcgcagcgaggatcagtccgtgtgttaaggggatcatgcgcgctcctccgtttttcttttcgcgcggtcatcggcgcggttgcttagcacttcgcccgcacgctcttcacgaccgacgtggaacgccaccaccaggcctgccagcagcagcatagacgccagttcgaccgccagaacataaggcccgaacagcgtaatgcccaccgctttcgcgctaatcggcgtgccgtcgatgccctggtcgttaacgcccagaatggcgtacacaatgaccgccagcataatggccgacaaaaccgccggaccaatccacacctgcggcttcagccactggcgttcctgttcgatttcgctgccgccgaggttgagcatcatcaccacgaacacaaacagcaccatgatggcgcctgcgtagacgataatttccagcgcaccggcaaagtaagcgcccagcgaaaagaacaccccggaaatcgccagtagcgatatcaccagatacaacagcgcgtgtaccggattggtatgggtgatcactcgcagggtcgcgaggatggctatcaggccacagatataaaaagcgaattccattgccctctccttacggtaacaggctcttgacgtcgataggcttggcttcgttctctgcttcgcctttatctttgccgtcgattgccatacccgccatccggtagaagttatattccgggtatttgcccggaccggaaatcagcagatcctctttttcgtacaccagatcctgacgtttgtattcgcccagttcgaagtccggggtcaactgaatcgccgtggtcgggcacgcttcttcgcacaggccgcagaagatgcagcgtgagaagttaatgcggaaaaattccggataccagcggccatctttggtctccgctttttgcagagagatacagcctaccggacaggctaccgcgcacaggttacaggcaacgcagcgctcttcaccgtccgggtcgcgcgtgagcacgatacgaccacggtaacggggcggtaaatagaccggctcttccggatacatccgcgtttcgcgtttggcgaacgcatgcaggccgatcatccagatactgcgtacctgagtgccgaaacctactaataattcttttaaggtcatggtctttgtgtcccttattgcgcctgccacagaatgacagccgccgttaccagcaagttgatgagcgtcagcggcaggcaaactttccagccgaaggacattacctggtcataacgcggacgcggtaacgacgcacgaatcaaaatgaacatcatcatgaagaacgcggttttcagcgcgaaccagacgaatggcggtaagaacgggccatgccagccaccgaagaacagcgttaccatcagcgcggaaacggtgacgatgccgatgtactcccccacgaagaacagaccgaatttcatcccggaatattcgatgtggtaaccgtccgccagttcctgttcggcttccggctggtcaaacgggtgacggtgacagaccgctacgcccgcgatggcgaaagtaacaaacccaaagaattgcggaatcacgttccacagatgcgcctggttattgacgatatcggtcatattaaatgaaccggcctgcgccaccacgcccatcagggaaagaccaagaaacacttcgtagctcaccgtctgggcagacgcgcgcatcgcgcccagcagcgagtatttgttgttgctcgaccaaccggcgaacagcaccgcgtaaaccgccagaccggccatcatcaggaagaacaaaatcccgatgtttaaatcggccaccacccaattagggctaaccggcacaatggcgaaggagagcagcagcgaagtaaacgcgatcatcggcgccagggtaaagatgacgcgatccgagaatttcgggatccagtcttctttaaagaacatcttgatcatatccgcgaccagctggagcgagccgccccagccaacgcggtttggtccataacggttctggaacagacccagcagacgacgttcgccaaagctcatgaaggccccgcaggtgacgaccaccagcagaatcaccaccgctttgagaatgctcagcaggatctcaatcagatccggtgtaatccaactcattgttgcgcctcccgcagatcctcaagacgcgcgccagccagaaccggcgcgatgccaggcatacccatcggcagccctacctgccctgccgctaacccttcagagatttcaaccggcagcgtcaccgtattgccatcgtagctaaaggagacgcgcgtcccggcattgacgcccaacttcgcggcatccgccgggttaagtttgatatacggctgcggcatacggctctggaagaccggagaacgctgagacaattcgtcgctgccaaacaggtggtaatacggcgcaatacgccactgaccgtcctgcgcctggaagcttgccggcacggtagtgaaataatccagaccgccctcagtcgcttcaatcaaacgcacgcccggatcgccgtgacgcagtttgccgcccacttcatcctggaatttgttccacgcctgcggggagttccagcccggcgcccaggcgaacggaatttcagatcgcggggcagtcggttggttattcccttccattgagaaggcgaacatggtgtctttatcctgcggctgacgtggttcatgcacgctgatattggcgcgcatcgccgtacgaccgctgtaacgatgcggttcgcgcgccagcttctgcccacgaatgcggaaggtcgcatccggcgcggcgtccttaatgccggcaaattgcggcatggcggcaatgaccgcgtcgatcacgtggtcaagctgagtccagtccacttcgcggttttcgacggtgctgtgcagtgaatgcagccagcgccagctttccagcataatcgtcttgttatcgtagtaggccggatcataaacctggaagaagcgctgcgcgcggccttcgttgttgatgaccgtaccatcgctttcggcgaagcttgccgcggaaagcaccagatgcgcgttttccataatcgccgtgcgctgatggtcaaccaccatcaccagcggcgctttggcgagcgcagcgttcacgcgcgtagcgcttgcatgacggtggagatcgttttccagcaccaccacggcgtccgcgctgccggtttccagctcgcccaacgcatcatcaagcgaaccgccgcccatcatacccagccccatgctgttcacggagcgggcaatcatagtaataccgacgtcggcgccacggcctttcagcgctttcgccacgttggcggccgcctgaatcacctcactgctaccggcgttagtgccggagataatcagcggttttttcgcgccggccaacgcctgcacaatgacatcaattttgttttgtaagtcgctgtcgataccgtcaaccgcaggcgctgtattgtccagcgcatgagcaatcgcaaagcccaggcgcgcctgatcttccaccggcgcgcgataggtccaggcggcgatatcatccagacgggtgtcatccacgttggtcacgaacagcggatgtttggcacgctggccgatgttaaggatggccgcaatctgccagtcggccactttctgcgccgccgccatttcacgcgctttacctttcaccgcctggcgtaccgccagcgcaacgcgcgcgccggtctgagtgacatcctcacccaagaccagtaccgcgtcataagattcgatctcccgcagcgccggggtgtaaattccgccttcacgcagcactttcagcgccagttgcagacgttcctgctcgccgcgcgcgataccggtgtagaagttttccgcaccaaccagctcacgcagcgcaaagttgctctcaatgctggcgcgtggcgaaccgataccgatcactttcttcgactggcgcagaatatccgccgcgccctgcatcgcctgctcggcgttgagggtgatgaagtcatcgccacggcgctgaaccggctgacgcggacggtctttcaggttcacatagccatagccgaaacgaccgcggtcgcagaggaagtagtggttaacggtaccgttgtaacggttttcgatacggcgtaattcgccatagcgctcgcccgggctgatgttacagccgatggaacactgctgacagatgctcggcgcaaactgcatgtcccatttacggttgtaacgctcggagtgcgttttatcggtgaagacgccggtcgggcaaatctcgaccaggttaccggagaattcgctttccagcgtaccgtcttccggacgcccgaagtagacgttgtcatgcgcgccatagacgcccagatcggtgccgtcggcataatctttgtagtaacgcacacaacggtagcaggcgatgcagcggttcatttcgtgcgagatgaacggccccagatcctggttgcggtgggtacgtttggtgaaacggtagcgacggaaactgtgccccgtcatcacggtcatatcctgaagatggcagttaccgccctcttcacagaccggacagtcgtgcgggtggttagtcatcagccactccaccacgctttcacggaactgtttcgcttcttcgtcgtcaatagagataaaggtaccgtcggtggctggcgtcatacaggacatcaccaggcgaccacgcgtatcttccgcgttttggtattgcttcaccgcacactggcggcaagcaccgacgcttcccagcgccgggtgccagcaaaaatacggaatatcaaggccgagggacagacatgcctgtagcaggttgtccgcgccattgacctcgtattctttgccgtctacatgaatcgtagccattagcatgcttccaaattaaaaatcgttaactcaccagcgctctttgagcaggttcggctgaataccattgattaaatgggtattactgaacggctgcttgatgccagcttcgaattcttcgcggaaatacttaattgcgctttgcagtggctcaaccgcgcccggcgcatgcgcgcagaaggttttacccggtccgaggaaacgacacagttgctcaagtgtctcgatatcccccggctggccttcgccacgctccagcgcgcgcagaattttcacgctccacggcagcccgtcgcggcatggcgtacaccagccgcaggattcgcgggcaaagaactcttccaggttacgcaccagcgacaccatgccgatttcgtggtctaccgccatcgccagcgcggtgcccagacggctgcctgctttaccgatgctttcgaactccatcggcaggtcaagatgcgcctcggtcaggaagtcggttcccgccccgcccggctgccaggctttgaatttcaggccatcgcgcataccgccggcgtagtcttcgaggatctcgcgcgcggtggtgccgaacggtaattcccacaggcccggattcttcacgcggcccgagaagcccatcagcttggtacccgcatctttgcttttcgagatgttctggtaccactccacgccgttggcgaggattgccgggacgttacacaacgtttcgacgttattcacacaggtcggcttgccccatacgccggaggtcgccgggaaaggcggcttggagcgcgggttcgcgcggcggccttcgagggagttaatcagcgccgtttcttcaccacagatgtaacgccctgccccggtgtggacaaacagttcaaagtcgaacccggtgcccatgatatttttgccaagcagcccggcctcggttgcttcggcaatcgcacggcgcagatgtacagccgcttcgatatattcgccgcgcaggaagatgtaaccacgatacgctttcagcgcgaacgcggagatcaacataccttccaccagcaggtgcggcagttgttccatcagcagacggtctttataggtgcccggttccatttcatcggcgttacacagcaggtaacggatgttcatggattcatctttcggcatcaggctccacttcagaccggtggaaaagcccgcgccgccgcgccctttcagaccggcgtcttttacctggctgacgatttcatccggagacaggccggtcagcgccttacgcgcgccttcgtagccgtttttgctacgatattcatccagccagaccggctgtttgtcatcgcgcagacgccaggtcagcggatgggtttcgggagtacggataacgtttttcatttataccgctccagtagttcaggaatggcttccggggtcagatggctgtgagtatcctcatcaatcatcatgttcggccctttatcgcaattccccaggcagcaggtcggcagcagcgtaaagcgaccatcaaaggtcgtctgccccggtttgatgttgagatttttttccagcgcggcctgaatcccctgatagccggtgatatggcacaccacgctgtcgcagtagcgaatcacgtggcgaccgaccggctgacggaagatctggctgtagaatgtggcgacgccttcgacgtcgctcgccggaatacccagcacatcggcaatagcgtagatcgcgccgtccggcacccagccacgctgcttctgaacaattttcagcgcttcaatggacgccgcacgcgggtcttcgtagtggtgcttctcgtgctctatcgcttcacgctctgccgcactcagctcaaaagcctcggtttgtggttgttgattctcgtgcataattagcggtccacatctgacataacaaaatcgatactacccagatagacaatcaggtcggagaccaggctaccgcggatcgccgagggaatctgctgcaagtgcgcaaagctcggcgtgcgcacgcgggtacggtagctcatagtgctgccgtcgctggtcaggtagtaactgttaatccccttcgtcgcttccaccatctggaaggactcctgcgccggcatcaccgggccccaggagacctgcaggaagtgggtgatcagggtttcgatatgttgcagcgtgcgctctttcggcggcggcgtggtcagcgggtgatccgctttgaacgggccttccggcatgttatcgaggcactgctgaagaatgcgcagactctggcgcagctcttccactttcagcatcacgcgggtatagcagtcggaaacgccgccacccaccggcacttcaaagtcaaagttttcgtagccagagtatggacgccatttacgtacgtcgaagtcgatcccggtcgcgcgcagccctgcgccggtggtgccccactccagcgcctctttcgcgccgtaagcggcaacgccctgcgaacgccctttcagaatagtgttacgcagcgcggctttctcgtaagaatccagacgcttcggcatccactcaaggaactctcgcagcaggcgatcccaaccgcgcggcaagtcgtgcgcgacgccgccgatacggaaccaggccgggtgcatacggaaaccggtaatggcttccaccaggtcataaattttctgccggtcggtaaaggcaaagaagaccggcgtcatcgcgccgacgtcctgaataaaggtcgagatgtacagcagatgactgttaatgcggaacagttcggagagcatcacgcggatgacgttcacacgatccgggacggtgatccctgccaacttttctaccgccagcacgtacggcatttcattgacgcaaccaccgaggtattcgatacggtcggtatagggaatgtagctatgccaggactggcgctcgcccattttttcggcgccgcggtggtgatagccgatatccggcacgcagtcgacgatttcttcaccgtcaagttgcaggataatacgaaacgcaccgtgcgcagacgggtggttcgggccgaggttgaggaacataaagtcctcgttgtcagtcccgcgcttcatcccccagtcttccggcttaaaggtcagcgcttccatttccagatcctgcttggctttggtcagctcaaacgggtcgaattcggtcgcgcgcgccggataatctttacgcagcggatggccttcccaggtttgcggcatcatgatgcgcgtcaggtgcgggtggccttcgatatcaataccaaacatctcccaggtctcacgctcgtaccagttggcgttagggaaaagtttagtgaaggtcggcacgcgcaggtcgttttcagacaacgccaccttgagcatgatatcgcgattacgctcaatggaaatcaggtggtagaaaacggaaaaatccgcggcgggtaacccgtcacggtgcgtacgcaggcgttcatccatgccgtgtaagtcaaacagcatgacgtaaggtttcggcagtttctttaagaaatcgccaacctccagtagttgttcacgcttgacccaaacaacggggataccggtgcgggtcgcctgaacggtaaaggcatccggcccaaaacggttgcgcagttcgccgataaccggatcatcaagatgatcgcgggtactccatgcagcgtcttgcgcggttaagtcggtcatattgttcaccattgcaaatggtccgtggtggtcggcagtgcttcgcgctattaaaatagtggttagcgaagtgaagtgctgctgccgacaggcgcaaattaaatctcgtccggggtacgcaggttcgtgacggcaatacgctcgccgcgtttacgttcgcgttctggctgcatattggcgcgatacacgccctgatcgcccaccacccatgagagcggacggcgctctttgccaatcgattcttgcagcagcatcaacgcctgcatatacgcttccggacgcggcggacagccagggatatacacatccaccgggatgaacttatcaacgccctgcactaccgaataaatatcgtacatgccgccggagttggcgcaggcgcccatagaaatgacccattttggctccagcatttggtcatacagacgctgaataaccggggccattttggtaaagcaggtaccggccaccaccatcaggtcagcctgacgtggcgacgcacgcagcacttccgcgccgaaacgggcaacgtcatgcactgcggtaaaagaggtcaccatctctacatagcagcaagaaaggccgaagttgtagggccaaattgagtttttacggccccagttaaccatgtcatgcagtttgcccatgaacacgtttttgttaacttcctgctccagggggtcggttacgatctcctgtttttgcagggggtaacggtcattctcaccgttaggatctatgcgggtgagcgtataatccatcttaatgcctcgcggttagcgttgacgattagcgatactgttcgtttccgggttcatacgctcgcggcgtgaacgcgcgggcgtccagtccaacgcgccaatacgcgccagataaaccagaccagccagtaacacaaaaataaaaattgcagcttccacaaagccaacccagccgctttcgcggatagaagtcgaccatgcgaacagatacagcgcttcaacgtcgaagataacgaagaacatggctaccaggtaaaacttggcagacaggcgtaagcgggcggtgccgaccgaatcgatacctgattcaaacggaacgttcttgtgcctcgcgcgtgcgcgaccgcccaaaaaccaaccgcctaccagcatcaggcagcacaggccaatggcaacgataagaaagatagcgaatgcccagtgatgagcgatgacttcagtggatgttgacatactcattgcttactcatcaaaagtagcgccagtttctctgctctttacggcagatgggcgccacatcgattcatggggaggaataaaaaaaaccctacaattactgtagaaaatgataaaaacagctaattgatgtggttttttactcctttctataaccttttgtcaactttaacaaaagttccttcacattaatttacatcaattcatcaccattaacattaagtgccatcctggagaaaatgactcttcgaccaggggggattttatgttgttgaatcgtgtccgttgtgaagcaaaagaaataacacacacctattttgacaggaatttgtgaagatgcctccccctaaatgggagtattttcttgatctgtgacacgcttttgttaattcaccccctaaaacagcaacaatttctctagttttttaacatgcaaattcataaaatggatgttctggttattttttgcccacattgaactgcgaatcgctactggctgatttaccgcaacttttacaatttgtgcggttaagcgcgtacagatgggcacaaaaaaagagccactgagcgttttttcatcgccagcggctcttttttacatttacgacttagcgccttttgcctgcgagctactcaaaacccccttccaccatcagcggatcatctccgccctctgcagaaaactggttgtaatgccatgggttttggtagctttccatcgcatggaaaatcaccatcgccagctcgttctggctattgggatcgcggcacaacagatattccgtatccggcaaaggcggtaatccgtctgcggcgcccagcacgcgaaggtcgggactcatcatttcgacaggtcgagccgttacgccaagaccggctttaacggccgcgcgtaccgccggtaatgtagacgccacataggccagccgccagggaatacccgctgcatttagcgtctccagcaccatatcgcggaatgggctgggatcgtccagcaggactagtggtacgggctctcccctttgcaaaacatactcagccgcacaataccaatgggtgggcgaggtccgcaaattcagacagtccagcgaatgaggttggttagtcgtcaccaccaaatctacttcctgcgatttaaccatgtccaccatataggcgttgcgttttacccgtacatcaagcgcgagtttcggataaaccgagctgattcggctaagcaaaaaaggcaggatagtatcagctgattcatcagaagcgccgattgttaacactccctgaagattactgaacattaatgatgaacacgcctcatcattaaaacgcaggatttttctggcgtaccccagaagctggataccgtgttcggtcaaaagtttgttacggccatggcgggcgaacaattcctttcccacgagttgctcaagacgctgcatttgctgactgaccgcagactgagtacgacataccgccgccgccgccgcggcgaaggtgttcagatcggcaacggccacgaacgttctcagcagatcgagatcgaggttaattatcggacgatttgcatttatcataatttttcacttactggcgggtcatatcgggctgacctggttaatgctgtgcattcagaaacaagcaattccatttgtaatgtgcatccttcgcagtaccgcctggttacccaggtaaatgttagaatgtaattgaaaatacgaccaaaacacttctcttacttactgatataataccaaatgcaactgatcgggatatatcaaagagaatttgtcatacctttaggcgtctacagatttctgctaatgatggacgtgtaaatcttgtaacagcgtcaaatagtttaccgagacgcacagatacaaaaacaatatattgaacaataggttatgtataaaatcgcgtcatgataattagcagacaacgcagactacgcccccgtttcggatcattatcttaacctaaaaccgctatatttataagtattattacgaataatcttaacctgggatatgttatactaatcggaccagaaagatattattacgactttagtaaatgctttttaaatattaaataataattaattaagatttctaccattcattaattatacttaacaatagtttcacaccccccgccgccggaaaggtctaaccttctcattttacctttaatactcagtatttccgaaatagccgacgcgacactaatgatgaatgcttatctctcataaaacagataatttatgacaacataaaaaaccacattacgcgcaatcatatagaacaaaacaccatacatacagaaaaaaatagaaaatacatctaactaaatgattttatgaagttttaaacagttcgaaagcgcgttaaaaataaacaaaatcttcttctgttcactcttcaaaactcaccgtcgtgggagtacattgtttcgtgctgacttccacggcagggagtggcaataacagctaaaaggtcaagattcatgtcccccattgaaaaatccagcaaactcgaaaatgtctgttatgacattcgtggccccgttctgaaagaagcgaaacgccttgaggaagaaggtaataaagttcttaaactgaatatcggcaaccccgcccccttcggattcgaagcgccggacgaaattctggtcgatgtcattcgtaatttgccgacggcgcaaggatattgcgactcgaaagggctttattccgcccgtaaagcgattatgcagcattatcaggcccgtggaatgcgcgatgtaaccgtggaagatatctatatcggtaacggcgtttccgagctgatcgttcaggcgatgcaggcgttgcttaacagtggcgatgaaatgctggttcccgcgcccgattatccgttatggacagcggcggtatcgctctccagcggcaaggcggtacattatctttgcgatgaatcttccgactggttcccggaccttgacgatatccgcgccaaaatcaccccacgtacgcgtggtattgtcattattaatccaaacaaccctactggcgccgtctattctaaagaattgttgatggaaattgtcaacattgcgcgcgagcataatctcatcatcttcgccgatgaaatttatgacaagattctctatgacgatgccgagcatcactctatcgccgcactggcgcctgatctgctgaccatcacctttaatgggttgtctaaaacctatcgcgtcgccggcttccgccagggctggatggtgctgaacgggccgaaaaaacatgcgaaaggctatattgaagggctggagatgttagcctcaatgcgcctgtgcgccaacgtcccggcgcaacatgctattcagaccgcgctcggcggctatcaaagcattagtgaatttattctgccgggcggtcgactgtatgaacagcgtaaccgcgcctgggagttgattaacgatattcccggcgtttcctgcgtaaaaccgcgcggcgcgttgtacatgttccccaggatcgacgctaaacgttttaatattcacgacgaccagaagatggtgctggacttcctgctacaggaaaaggtgctgctggtgcaaggtaccgcctttaactggccgtggccagatcacttccgcattgtgacgctaccgcgtgaagatgacctggagatggccatcaaccgttttgggcgtttcctctcaggttaccatcaataatcttaaattcaggctacttcggtagcctgaattgcatcttcatctccctccccgcacaatgaagtctgccgcagtgaaaacaaaaggtaatctatgaagcagagccattttttcgcccatctctcccgcatgaagttgattaaccgctggccgctgatgcgtaacgtgcgtacagaaaacgtctccgaacatagtctgcaggtggcgatggtcgcccatgcgttggcggcgataaaaaaccgtaaatttggcggtcagctcaatgctgaacgcatcgcgcttctggcgatgtatcatgatgcctcggaagtactgaccggcgatctgccgacgccggtaaaatattttaattcccagatagcccaggaatataaagcgatcgaaaaaatcgcccagcaaaagctggttgatatggcgccggatgaattacgcgatattttcgcaccgcttattgatgagaatgcctggagcgaagaagaacaggcaatcgtaaaacaggccgatgcgctttgcgcctacctgaaatgcctggaggagctctcagcgggaaacaatgagtttggactggcaaaaacgcggctggaaaaaacgctggaattacgtcgcagccaggagatggactattttatggcggtattcgtaccaagtttccatctttctcttgacgagataagccaggattcaccgctttagttgccggatggcggctaacgccttatccggcctaccgttcttcccgtaggcctgataagcgtagcgccatcaggccttttcctgtctggggttaaaacggaaacaacattggaatcatcacaatacaaaccgccatcacaataagcgtgaacggcacgccaagcttcacaaaatcgctaaagctatagtttcccggccccagaaccagagtattgaccggcgatgaaaccggcgtcataaaggcggcggatgccgccatcgccaccgccatcgcaaacggatagggcgacacccccatcgatttcgccgccgccagcgcaatcggcgccatcagcaccgccgttgccgtgttagaaatgaacagtcctatgacggcacacagcacgaacaggcatcccagcatcatatacggcccatagccgccgccgatatccattaatccttgcacgaccagagagacgccgccggttttttgcaacgccagcgcaaacggcatcatacccacaatcaagataatactcggccagtggatcgctttatacgcgctttcagcatcaatacagcgaaatttccccatcagcaggcaggcgataatcgccgcgatcgggttgggaatttcatcggtcaacatcagcgccaccatcagtaccaggcagaaaatggcgtgcggcgcctggctgtgcgcaggagaggcttcgctgacctcgaccggcatattcagcaccacaaagtcgcggcctttttgccccagcaggctgattaacttccagttccccacaaccagaatgatatcgcccatcaataacggttcatcggccagcgatccttccagcgcgacgccgtcgcgtttcaggccgaccacattcagcccgtaacgtgtacggaaggcgatttcacgcaccgacttgcctatcagttcagactccggaataagcgaaatttccgccatgccaacatccaacgcctgatcggaaaaatattctccacgcaataccatcggttccagcagttgctcggcgcagaactctctgaggtcaacctccgccgccgacatatcaatcagcagaacgtcgcgagcgcgaaactccgatacgccgttcacattgacgataacccgccgaaagcgccgccagcgttcaacgccgatgacattggcgccgtaacgttcgcgcagtttaaggtcgtccagccgctgtcccaccatcggcgaaccggggcgaatcgccagacgacgagcgcgccccgtcagacggtactcgcggataagatcgcggaaagtgcgacgcttaccggcctgttgtccgggcgcatcgccttttagcatgaagcgcatcaccagcatataaacaatgccgagcgccaacaccactacccccagcggcgtcacgctaaaaaagttgaacccgtgcaggccttcacgcagcagttcactgttaaccaccaggttcggcggcgtcgccaccagcgtcatcattccgctgataagcccggcaaaactcagcggcatcatcaggcgcgaaggcgaggtctgcatatgcatagaaacgctaagaacaacggggataaagatcgccaccacgccggttgaactcatgaaagcgccaagtccggcgacggtgatcatcagtaaaaccagcatcttgatttcactgctgcccgccattttaaccagccaggtaccgaccaccgtcgcaacgccggtgcgcacgaggccgtcgccaataataaataaggcggcgataagaatgacattcggatcgctaaagccggagaaggcttccggaagggtcaaggtaccgctaaggacaaaagcaacaatgacgaataaagccaccgcatccatacgtactttgcccgtcgcaaacaacacgacggcaatcgccagtaaagagagaacccaaatcaattcaccgttcacaacatatccttgtcagatgagaagataacgcgattctgccataaatatgccccgccaaagcggggcgatatcatgatcaggtctttcttaacaccaccacatcgccgtttggttgtttagcgaccgataattgcgtcaggctatccaacgcaaaatcaacatccgccagacgcggcgtgtcggccggcgcattgaccgcaatgacgtggcagcccgcagccagcccggacagcacgccagccggggcatcttctactacgacgcactcctgaggggccaggccaagcagttgtgcgcccagcaaatacgcatccggctccggtttgccgcgtttgactcgttcggcggtgacaaacacctctggcgctggaaggcccgcgacctgatggcgcgcacgcgcgaccggcattgaaccggaggtgacgatagcccacggaatgcccactttattcaggtgattgagtaaatcgactgcccccggcagcgcggtgatccctgcggtttcagtggcttctatttgctccaggcgcgtaaactcagcggcaatttccgcctccgatttacccgccataaaatgccgcaacgaggtgatcgcctgtttgccatgaataaagcccagcacctcatcatgagcaaggttaaaacgatcggcccagctacaccacgcgcgttcaacggcaggtaatgagtcaaccaacgttccatccagatcaaacagaaaacctttacactgcacgcgagcctcctcaggcattaatgatttgattgatttcattcgcgctcaggtggtactgacgcgggcaggcatgccagacattcaacatccgctggtatttttcccacatcggcgtctgggcattaaagccgtgtgtcccggcgtcaaagtgagtgtagcgtccttctatattcaccataaaacggacatagccgaggtagcgcgcttctgtcgcggcgtcaaaccccaggaaggtgacgcgacgttcgtcgatggcttgcgtatctttgaggttggtccaggagacgtgcagcgcatggtacatctccataatatcgatgatggtacgacaggtctcttccgtcagctcgccaaactcgcgatccagctcgcgcatctgcaggccgtagccgcgttcaataattgtttgtaagcgacggtaacgctcggcgttggtgggatcgagcatcgtcatcattttgtactggttagacaaaatcagacgttgcgcgttggtcatttccattttgaactcctgtatcacgctatggcgatgaaaaaaagaaggcattggtatgccttcttttatatgcgtaatccggggtcaattacaaatcatccaggaaagttttatccagttgtttgaaggcgcgcttaagcgtgtcagctaatgcctggtaatccggctttccttctaccggcgccagcgcttgtccagcctcctgcaatttaccgcgaacttcgtaaaaccagttaaggattgaaggcggcaacggcgtcacggaacgtttccctaaccaccataatccctgcatgggcaagctcagggcgaacagggcggtcgccacggccggacctaactgaccgcccagcgctatctgccagcataatgtaaagacggcgacaggcggcataaatcgtatggcatagcgcgtcatacgaatgacgcggttttcgacgaaaacgggcgccagccgtttttccatcggccacgtcttcgcgtagtgctgcccccggcgaaataagctaaaaaaatttacggagcgattatccggtgtcgacatggcctacctcaacttcacatataaaatttaaaaaatttgtgcaaaacaacaactgcgagggacaacgttcaaaacattttgtcttcgatacccactatcaggtatcctgtgtcggcctgtcaaaggccggtagtttaaaatcattgagtcgtcaatattacacatagtatgccattggctgaaaaatacgcaaaatggcatagactcaaaggtatttcttccatcatgcccaaaaaaactcctgcgcatgatgttaatcataaatgtcagggctatcatgcgctacgctctatggctcactgacgtttttttagccacgtatcataaataggtacttccatgtcgagtaagttagtactggttctgaactgcggtagttcttcactgaaatttgcaattattgatgcagttaatggtgatgaatacctttctggtttagccgaatgtttccatctgccagaagcacgcatcaaatggaaaatggacggcagtaaacaagaagcggctttaggtgcaggcgccgctcacagtgaagcgctgaactttatcgttaacactattctggcacaaaaaccagaactgtctgcgcagttaactgcaattggtcaccgtatcgtacacggcggcgagaagtataccagctccgtagtcattgatgagtccgtcattcagggcatcaaagattccgcctctttcgcaccgctgcataacccggctcacctgattggtatcgccgaagcgctgaaatctttcccgcagctgaaagataaaaacgttgcagtattcgacaccgccttccatcagaccatgccggaagaatcttacctgtatgccctgccgtacagcctgtataaagaacacggcgttcgtcgctatggcgcacacggcaccagccacttctatgtaactcaggaagcggcaaaaatgctgaacaagccggtagaagaactgaacattatcacctgccacctgggcaacggcggttctgtttccgctatccgtaacggtaaatgcgtggatacctctatgggtctgaccccgctggaaggcctggtcatgggtacccgttccggcgatatcgaccctgcgattatcttccacctgcacgacactctgggcatgagcgtggatcagatcaacaaaatgctgaccaaagagtccggtctgctgggtctgactgaagtgaccagcgactgccgttatgttgaagacaactacgccaccaaagaagacgctaaacgtgcgatggacgtttactgccaccgcctggcgaaatacatcggttcttacaccgctctgatggacggtcgtctggatgcagtcgtgttcaccggcggtatcggtgaaaacgccgcgatggttcgcgagctgtctctgggtaaactgggcgtgctgggctttgaagtcgaccacgaacgtaacctggcggcccgcttcggcaaatctggtttcatcaacaaagaaggtacccgtccggcggtggtgatcccaaccaacgaagaactggttatcgcgcaagacgcgagccgtctgactgcctgatttcacaccgccagcctcgctggcggtgctgttttgtaacccgtccccaaaagacggtaacgaaagaggataaaccgtgtcccgtattattatgctgatccctaccggaaccagcgtcggcctgaccagcgtcagcctcggcgtcatccgtgctatggaacgcaaaggcgttcgtctgagcgtctttaagcctatcgcccagcctcgcgctggcggcgatgcgcctgaccagaccaccactatcgttcgcgcgaactctaccctgccggcggctgaaccgctgaagatgagccacgttgaatctctgctctccagcaaccagaaagacgtgctgatggaagagatcatcgcgaactaccatgcgaataccaaagacgcggaagtggtgctggttgaaggtctggttccgacccgtaaacatcagttcgctcagtctctgaactatgaaatcgcgaaaacgctgaatgcggaaatcgtttttgtcatgtctcagggtaccgacacgccagaacagctgaacgagcgtatcgaactgacgcgcagcagcttcggcggcgcgaaaaacaccaacatcaccggtgttattatcaacaaactgaatgcgccggttgatgaacaaggccgtactcgcccggatctgtcggagatctttgacgactcttccaaagcgcaggtgatcaaaatcgatcctgctaaactgcaggaatccagcccgctgccggttctgggcgcggtgccgtggagcttcgacctgattgcgacccgcgctatcgatatggcgcgtcacctgaacgccaccatcattaacgaaggcgatatcaaaacccgccgcgttaaatccgtcactttctgcgcgcgtagtattccgcatatgctggaacatttccgcgcaggctcgttgttagtgacctccgctgaccgtccggacgtactggtcgcagcttgcctggccgcgatgaacggcgtagaaatcggcgccctgttgctgaccggcggctatgaaatggacgcgcgcatttctaaactgtgcgaacgcgcattcgccaccggtctgccggtctttatggtgaacaccaacacctggcagacttcgctgagcctgcaaagcttcaatctggaagtcccggttgatgaccatgagcgcatcgagaaagttcaggaatacgtcgcgaactacgttaacgctgagtggatcgagtcgctgaccgccacttccgagcgtagccgtcgtctctctccgccggcgttccgctaccaactgactgagctggcgcgtaaagccggtaaacgcgtagtgctgccggaaggcgacgaaccgcgtaccgtcaaagcggcggcaatctgcgctgaacgcggcatcgccacttgcgtactgctgggcaacccggatgaaatcaaccgcgtcgcggcatctcagggcgttgagctgggcgcaggtattgaaatcgtcgatccggaagtggtgcgtgaaagctatgtcgctcgcctggttgagctgcgtaagagcaaaggcatgaccgaaccggttgcccgcgaacagctggaagacaacgtggtgctcggcacgctgatgctggagcaagacgaagtcgacggcctggtttccggcgcggttcataccaccgccaacaccatccgtccgccgctgcagcttattaaaacggcgccgggtagctccctggtctcttctgtgttctttatgctactgccggaacaggtttacgtttacggcgactgcgcaatcaacccagacccgaccgcagagcagctggcagaaatcgcgattcagtctgcggattccgccattgccttcggcatcgaaccgcgtgtggcaatgctctcctactccaccggcacctctggcgcgggcagcgacgtagagaaagtacgtgaagcgacgcgtctggcgcaggaaaaacgtcctgacctgatgatcgacggtccgttgcagtacgacgccgcggtcatggctgacgtagcgaaatccaaagcgccgaactcgccggttgcgggtcgcgctaccgtgttcattttcccggatctgaacaccggtaacaccacctacaaagcggtacagcgttctgccgacctgatctccatcgggccgatgttgcagggtatgcgcaagccggtgaacgacctgtcccgtggcgcgctggttgacgatatcgtctacaccatcgccctgacggcgatccaggcttctcagcagcagcagtaacagtaaaagctaatgccggatggcggcgtgaacgccttgtccggcctacaggtgagataccgttgtaggccggataagacgcgttagcatcgccatccggcattctgctatttaccctgcaaagcggaattttttgcttaactgcgctgcatcaatgaataactattcccttcttctcatacttagcctctttgctttgcaacagggatagtctgtcatgtctgtcgttacagaatcaaaaacagccagaaaatgggcaatgcccgatacgctggtcatcatcttttttgtcgccattttaaccagtatcgccacctgggtcgtccccgttgggatgtttgatagccaggaagtgcagtatcaggtcgatggtcagacaaaaacccgcaaagtcgtcgacccgcactcttttcgcattgtgaccaacgaggccggggaagcgcagtatcatcgagtacaatttttcactaccggcgatgaaagaccagggctgatgaattttccgtttgaagggttaacatccggatcgaaattcggcactgccgtcggcatcattatgtttatgttggtgattggcggcgcattcggcatcgtgatgcgtaccggcaccgtggataacggcattctggcgcttattcgccacacgcggggcaacgaagtcctgtttattccggtgctatttgtcctcttttcgttagggggcgccgtatttggcatgggcgaagaggcggtcgcctttgcaattatcatagccccgctgatggtcaggctgggctatgacagcattaccaccgtcctggtgacctatatcgccacccaaattggctttgccagttcgtggatgaacccgttttgcgtagtcgtcgcccaggggattgccggcgtgccggtactttccggctccgggctgcgtattgtggtctggattgtcgccacgctgattgggctggtttttacgctggtctacgcctcacgcgtgaaaaagaatccgctgctgtcccgcgtccacgaatccgatcgctatttccgcgaacagcaggatgaagtcgtccagcgccctttcaccttcggtgactggctggtactgctggtcctgaccggcgtaatgatttgggtcgtctggggcgtgattgtccacgcctggtttattccggagatcgccagccagtttttcaccatgggcgtggtgatcggcctcattggcgttatcttccgcctcaacggtatgacggtcaacgtgatggcgtcctcattcaccgaaggggcgagaatgatgatcgcgcccgccttgctggtgggttttgccaaaggcattctgctgctggtcggcaacggcgaagccggggaacccagcgtgctcaatacgttgcttaacagtatcgcgcatggcatcagcgggcttaataatgctatcgccgcctggtttatgctgctcttccaggcggtatttaatttctttgtcacgtccggttcgggtcaggcggcgttaaccatgccattactggcgccgctcggcgatctggtcggtgttaaccgtcaggtgactgttctggccttccagtttggcgatggcttcagccatattatctatccgacatcagcctcgctgatggccacgctgggcgtgtgccgggtcgattttcgcaactggctgaaagtgggggcgtcgctgctgggactactgtttattatgtccagcgtggtcgtcattggcgcgcagatgatgggatatcattgatccaaaatgccggatgagcatcagcgccatccggcaatatctccatgattaaagcagtgatttcgcggcttctacaatcgcttcggcggtgagtccgtactctttttgtaagaaatcctgcgttcctacctgcccataacgctctttgacgccaacacggcgcatcggcaccggacagttttccaccagcacttccgccaccgctgaccccagtccattatggatgctgtggttttcacacgtgacgatacgccgcgttttttccgcgtagtttttcaccaacatgcgatcgataggctttaaggtgaacatatcaatgaccgcggcgctcacaccttcctgctccagttggcgcgccgcctccagcgcctccgccaccataatgccgttggcgataagcgtaatatcatcgccctcgcgcagtacgttgcccttgccaatggtaaaggtagagcctggcgcatagatactccgcgcctgcttacggatggtacgcagccagtaaaaaccgtccaggtccattagctggcgtaaaatatccgcgaacatcaccgcatccgtcacctccagtactacggagtgcgccagcccgcgaacaatccccatatcttcaaaagacatatgggtgccgccgttatggcacgctgtcactccggcatcggaggcgatcactttgacgttgttacgctgataatccagcgccataaagagctgatcaaaacagcgacggctggcaaaagcggtaaaggtatgcacaaacggtttacgaccggtcagcgccagccccgccgccgtgccaatcacattcgcctccataataccgcagttaatgacatgctgcgggtagtcacgcgccacgctgtccatcgccattgagctcattaaatcagcctcaagcgcaataattgggcttccggcctcaatctgcccggcgataaaaccggcgtaaactttgcgcatttcgatatcgtctttaagccctgcgggcgcaagcttaatcatgcatgacctccagttgatgaatggcctcattgagcgtctgcttcatgccatccgtcaggcgtaagtggtgagaattcgttaactgctccaggcatggcaccccctgccctttaatgctgtcaaggatcacaacccgtggctgggcatcggcgggcggcacaggctgaaccaccgccagtagtccggcgatatcatcgcctttgacggtgacgacatcgaaaccaaacgcacggaatttcccttccagatcgaatggattgataatctcctccagctcgccgtcaagctgctgtttattccagtcaatgaaaacggtcagattattcaggcggtggtgggcaataaactgaaacgcctcccagcactgcccttcattcagctccccatcgccgacaatgcaaaatacccggttgggtcgccgcgccagtttatgcgacaacgccattccgcccgcaatagagatgccctgtcccagtgagccggtcgtggcgtccacgccgcgcgtttttagccgatccggatggctgggaagacgggtgccgttctggttaagcgtattcagctcttcgcgcgggaaatagcctttaatcgccagggtactgtacaacgcggggcccgcatggcctttcgacagtacgaagtaatcgcgttccggccagtccgggtcggcagggtcgattttcatcaccgcgccgtacagaaccgccagagtctccactaccgacatgctgccgccatagtgaccaaagccaagatggtttaaggatttgagcgtggcgacgcgaatatcgcgcgccagttgggtgatttcggttacgttcattctttcgctccgctattttcctgcacttcggcagtcgcttttttgtttttggccaacacgttgtacgccaccagtagcgcgaatagcgccaccaccagccccgtgatagccatcggcgacagataacgcgccaggttgcccagcaaaataccgattacgccaaagtcagcatccgagaacgtggtattggcgaagccgatcgcgccgagaaccggcagtaacagcactggcaggaaagtgattaatagaccattagcaaatgcgccgatcatcgccccgcggcgaccgccggtggcattgccaaagacgcctgcggtcgcgccggtaaagaagtgcggcacaacgcctggcaggattaacacaagcttcatctgtccaagcaggaacagccccaccagcccgccgagaaaactgaacaggaagccaatcagtaccgcgttaggggcatagggatacaccaccgggcagtccagcgccggacgcgcgtttggcaccagtttttctgaaaagccggtaaaggccggaacaatttccgccagaatcagacggacgccttgcagaatgatgaatacgccggcggcgaaggtgattgccatgatgatggcgtacaccagatagttttgcccgccgctaaacgtcgcttcgacatactcacgccctgcgctgactgccatgatcagatagataatcatcatggtcagcgaaatcgagatagaactgtcgcgtaaaaaactgaggtttttcggcaggttcatctcttccgtggagcgggagcctttaccacacaggctgccaatccagccggaaagcacatatcccagggtaccgaagtgaccaaacgcaatgtcatcggtaccggtaatccgcctcatataacgttgagccaaggccgggaagaaggccatcaccagccccaggatcagcgatccggtgaagaccagccctacgccctcaaaccccgccacggtcaggattacgccaatcatacaggccatgtaaaaggtgtgatgcccggtcaaaaagatatatttaagacgcgtaaagcgtgccacgacaatattggccaccataccaaatgccataattaacgccgtggacgcgccatatttttccagcgcgattgagactatcgcttcattattaggaataatgccctgaatattaaaagcgtgttcaaacataccccctagcggatttaatgaacccaccagtacggttgcgccgccgccaagcacaataaaacctaaaatggttttaatcgtgcctttcaccacatcggaaaacgcttttttctgcgccaccagaccaatcagcgcaattaaccctacaagcaccgagggcacttttaaaatatcaacaacaaaattcagcgtttcaaggataaacatatccacctcgccagcaataattattgtttagcgaaccatgcgcgcagctgcgtttccagttcgttgatgtcgatgatgttattgatcaccaccagttggctttccggtacgctggcgctggccgcgatatctttggccattacaaaaagatcggcagccccgggcgtggccgatgaaagatcggagtgttccacctcggcgtcaatattgagtttctttaatacttttttaatgttcatttctaccataaaactactacccaggccggaaccgcaaattgccatgattttcattattgtcaccttttaaaagtagagttggtctgcatcacgcacgggcgtaatgttatttaccgcaagaaaatggaataaaatcagaaacggtcaataatcgttttaatgtcctccaggttttttgcctgatgtaatttttccatatctacatcactggaaaataattccgccagcgccgatatcatttcgatatgactgtgcttatcaggcgccgccagcataataatgatgtcaaccggatcgaattcgtctgcgccaaatgaaacgccgtgctgtagtttcagtaacgataaacctaaccctttcgccccctcttccggcctcgcatgcggcatcgctaaccctggcgctaatacataatatggcccaagcttttggtgctgctgaacaatcgccgtaaggtattccggtgcgataacacctgcgtccagcaggggtttgccgcaaatttccagcgcctgcggccacgtttccacgctctcctgtagcgtgatggttgcgtcagataaccaggttcccagcatgttattcgcccccacggtgtatgaaattatgaacaaactttattcaagccattcgatattagctgcgatcgttatcacaaagatagcgctaccagcgactattactcagaattgtgatagcgctatcaaattaaaatcatggtgtgaaatcacagcaaaaaagcggatttaaggcgtatactgccagtcatgcgaagcaaagaacgacaataaaaaagcatctcaacatgttgtaatgacgcaggaatttgtatgtcgataccccgtaaacggcgcagtaccggtaaagtgactatcgccgatgtagcccaacttgccggtgtaggcacgatgaccgtatcacgagccttacgcacgccggaacaggtctctgataaactccgggaaaaaatcgaagcggcagtgcatgagctgggctatatgcctaatctcgccgccagcgcgctggcgtctgcctcctcgcacaccatcgcaatggtcgtaccgaaccttgcggaagcggggtgttctgaaatgttcgccgggctgcaacaaattttacagcccgcaggctaccagattatgctggcggaatcgcagcatcgcgtggaacaagaggagaagctgctcgaaacgctgctggcctccaacattgccgcagcgattctgcttagcgtcgaacatagcactaccgtgcgccagtggctaaaaaatgcctctatcccggtgatggagatgggcgcgattcgcagcgatcctattgatatgaatatcggtattgataacgttgcggcaatgtatgagctgacggaaatgctgattcagcgcggttatcagaatatcgggctgctatgcgccaatcaggagcagtggatttttcagcaacatctgcacggctggtacaaagcgatgcttcgccaccatatgtcgccaaaccgggtgattaatgccgccttgccgcccaatttttctaccggcgcgtcgcaactgccggagtttttactggcgtggccggagctggacgcgctggtatgcgtatcggatgagctggcctgcggcgcgttatacgagtgccaacgacggcggatcaaagttccggacgatttagcggtggtcgggtttggcgatagcgatgtcagccgggtctgccagccgccgttaaccaccatggccgtaccgcaccgtaagattggcagtgaagccggacgggcgctgttggaaaggttaaatcagggaaactggagcgatcgaaaatccatcgcctccagtttatgtatgcgggaaagctgctaaaacgcttattccgtctcttccggtttctcctggagcgcggcttcgtttttggcgttgcgggtcatccacagcgccagcgctttgagcgaatctggcgtaaactcatcacagcgcgcggtgatctcctccggggtcagccaacacacttcgctgacttcatcttcctgaagcgcgaaaggcccgtgggaaacgcagctaaacagcgcgccccaaacccggcaatgttggtcttcaaagtaaaacagaccgtgttcggcaaacggcacgcctgcaatacccaactcttcttccgcttcgcggcgggcagattccagtagctgctcatcagcctgaaccacgccgcctgcggtagcatctaacataccgggcaaaaaatcttttgtttcggtacgacgctgcaccagaattttacccataccatcatgaacgacgatatacgtcgcacgatgccgtaagcgttgcgcacgcatctgttcccggctggactgtgcaatgacttcattgtcttcattcacaatatccacccattccgtacttgccaaacgacgctgttccaccatcaggaaaccttcttatttctggcgctcttacggcgcatttacgtttgtgaggtaaattacgagttaattgcaacctgcgcaatgatactttgatcattgagtgcgattacgctcaacacattatcatccagaataccgtagcttgccgcatacccgcctttcgggatgctcactgacccaggattaaagtgatacagtccttcctgctgttgcgccaccggcagatgcgtatgaccatagaccaacacatcgccagtatgcagagcgggcagattcgtcggcccgaagaggtgcccatgcgttaaaaatagccgcctctcttgcgtcaatatttgctgccacggcgcagttatcgggaaatgcagcagcatctgatccacttcgctatcgcagttgccgcgcacggcaatgatttgcgtcgccaccgcgttcaggcgttcggcaacctgagcgggcgcatagccttcaggcagcgcatttcgcggcccgtggttaaggacatcgcctaatatcaccagccaacgcgcgccgctttgcgcgaaccgctcaagcacgcgttccgtggcgggtaaagaaccatgaatgtccgatgcgaacatcagtttcatcgctcactcctcgttgtgaaaaacggcgttatgatactggaatatgaatagattttcagcctgaacgcttcgaggaaagcgcaataaaacgctgtacggaagcacgctgccactggaatgtcgcatatgccgccagcgatgccggcacgtcatcgccatgcagcgccagacgattgatcatcaatgccagatcggtatcggcaatgcaccattcaccaaataaattttgcgtcccctgccccaatagcgcttcagccgtcgcaaacagttttgccgcgctggcttttccagcctcgcttagcggcgcttttttcgccccggcaaacactacgtcggtaggccgttcttcgcgaagcggcagtaaatcgctgcgtagccacgcctgaatctgtcgcgcgcgggcgcgtttttgtaaatcgtgcgggtagatacgctcccactgcggcggcgcgaaacgctcctccaggtattccgcaatagcggacgactcgctcagctcaaaattgtcggcctcaagcaccggtacgcgctgcgtcagcgcatatcctcgccagccaggttgcagatgttctccctggtccagatcgcgagttttcagagtaaaggaaagccctttttcttgtaatgccacccaggcggacaagacgtagggagagaaaaagttcgcatccgaccacagcacaataacaggcttactcataatgtcctcttgagggcgtattaggtttcttcccaaaatatagcgtctttcgcctgctgtcacctgatgaaaactcacacacatcaggaggctttctatacttaattcagcccagactctttacgcacatgcaggagccaaaatgattgacctttactacgcccccacgcccaacgggcataaaataacgctgtttctggaagaggcggagctggcgtatcgtttgctaaaagtagatatcagcaagggcaatcagtttcgccctgattttttggctatctctcccaataataaaattcctgccatcgtcgatcacgccccggcagacggcggtcaaccgcttagtctttttgaatccggcgaaattcttctctacctggcggaaaaaagcggcaaactgcttagcggggagctgcgtgaacgccataccacgctgcaatggctgttctggcaggtcggcgggttagggccgatgctgggccagaatcatcactttaaccactttgcgccgcaggccatcccctatgcaattgaacgctatcaggttgaaacgcaacgcttatacaacgtcctgaataaacgcctggaaacctccccgtggctgggcggcgaccactacagtattgcggatatcgccagttggccgtgggttaacgcacatcagcgtcagcgaatcgatcttgatacctacccggcggtgtataactggtttgaacgcattcgcacgcgtcctgcgacagcgcgcgcactgttacaagcgcaactgcactgtaacagtacgaaagcgtaacgcggtagcatacatcatgtatgatgtagaggtgtatacacggaaaaaacctgcgtccggcacccttattcgtattaaaaacctgacattagggaagaggaaatcctccctactctggaggtcatatgcagattctgattaccggcggtacaggcctgatagggcgtcatctcattccccggctgttaacactggggcatcaggtgacggtcgttacgcgcaatcccgataacgcgcgtcagattctcgattccagagtgacattatggaaagggctggcggaacgtgagcacctcaatgagattgatgccatcatcaatctggcgggcgaaccgattgccgacaagcgctggacgtcgcaacaaaaagaacggttgtgccaaagccgctgggctatcacgcaaaagttggtggatttaattcatgccagcgcaacgccgccctcggtgttgatatccggctccgccacgggctattacggcgatctgggtgacgttgtcgtcactgaagatgagccgccgcacaacgaatttacgcataaactttgcgcccgctgggaacagattgcctgtcgtgcgcagagcgaccagacccgcgtctgcctgctgcgtaccggcgttgtcctggcgccgcaaggcgggattctggggaaaatggttccgccgtttcgcctcgggctcggcggtccggtgggtaatggtcggcaatatctggcctggattcacatcgacgatatggtcaacggcattctgtggctgctggataacgatcttcgcggtcccttcaatatggtctcgccgtatcccgtccataatgagcattttgctcatgcgctgggtcgcgcgctgcgccgtccggcgattattcgcattccggcgacggcaattcgcttattgatgggagagtcgtcagtgctggtgttgggcggacagcgggcgctgccaaaacggcttgaagccgccggattcgcatttcgctggtatgatttagaagaggcgctggcggatgtgattcgctagttcccaaagcgccgtatcctgcccggtgagcgatgcgccgccgggcttcttttatttcagcgagcctttcaggaattgctgtaaacgcgggctttgcggattgccgaacacctgctccggatcaccctcttcttcaattttcccctgatgcagaaaaataacgtgcgaagagacatggcgagcgaagcccatttcatgcgtgaccaccaccatcgttttgccttcttccgccagttgttgcatgatgcgcaacacttcgccgaccagttcaggatcgagcgccgatgtgggttcatcgaacagtaaaacgtcaggttccatcgccagcgcgcgcgcaatagaaacgcgctgctgttggccgccggagagatggacgggatatttgccctgagcgcgctcatcaatccccaccttcgccagatatttcaacgcccgctcgcgcgcgtcgtgcttgcttaatcccagtacctgaatcggcgcttccatcacattttccagcaccgtcatgtggctccagaggttgaagtgctgaaacaccatcgtcaggcgggtacgcaacaagcgtagctgatttttatccgccactttgagctgcccatctttgtcgcgcaccagattaatgttctgaccgttcacgataatcgcgccttcgctcggtttttcgaggaagttaatacagcgcaaaaaagtgcttttaccggagccggacgagccgatgatgctaatcacatctccggcgcgggcctgcagcgatacccctttcagcacttcatgaccgccgtagcgtttgtgcaaatcgataacgtgtaatttattttctgacatcatgttactcgaattatttagaggacacgtgctgcaaccagcgtctttccgcccgacggaacaggcttatcaggacatacgaaatgagtaaatacaacacggcggcaatgccaaacgcggtaaacggctggtaagtcgctgagttaatatcgcgggcgattttcaacaaatccggcaccgtcgcggtaaacgccagcgccgtagagtgcagcattaaaatcacttcgttgctgtaggcaggcaaggcgatgcgtaatgccgacggcaaaataatgcagcgatacattttaaatgacgagaagccataggcccgtgccgcttcaatttcaccgtgcggtaccgagcgaatcgccccggcgaaaatttccgtggtgtacgcgcaggtattcagcgtcagcgccagtacggtacagtttagtccgctgcggaaaaacgcgttaagaagatcggtgcctttgactatctccagcgtatacatccccgaatagaacaccagtagctgtacgtacagcggcgtgccgcgaaaaatatacgtaaacagccagatgggaaaacggatgaatttattactggaaacgcggcctaccgccagaatcaccgccagaagaccgcccatcaccaccgatgaaattaacagccacagcgtaatcgccacgccggtaaaacgatagccatccgtccaaagcagggatttccagtactcctgaatgatctcaatcacaaatcggccctcttcacgcccacggaatagcgacgctcaagtaagagcagcacaccattggaaacggtggtaaataccaggtagataagtccacagaccacggcaaaatagaaaggctcccaggtacttttaccggcaagctgcgtggctttgacgacatcttccaggcccagcagcgacaccagcgccgtcgctttgagtatcacctgccagttattgccgatccccggcagggcgtaacgcatcatcgccgggaacataatccgccggaaggtttgcccgtgggtaaaaccaaaggccgtcgccgcctcgatatggcctttcggcaccgccataaacgcgccgcgaaaggtttcggtaaaataggcgccgtagatgaaaccaagggtgataataccggccaccatcggatcaatatctatctggtcgatacccagcgaatcggtcaccacgttaagcgcgatttgcaatccgtaaaatatcagcagcattaagaccagatccggcaccccgcgaatcagggtggtgtacccttcaaaaataagccccgttacccggttttgcgaaagcttcgcccccgcgccgacgagaccgataagcacggccagcaccacggaactgagcgccagttccagcgtgacgatcgcgccctgtaaaattacgcctgaaaacccgtacaacatgcagcctgtcctgttgtgtgtggtgaagtaataagcctcttttgcatttttgcctcacatcacgccggatggcggctgtgccttgcccggcctacgatgctccccgtaggcctgacacgcacagcgccatcaggcaatgcagacagtcaacattctttgggctttatctgcaccgacggtgattaaccgccataaacatcaaaatcaaagtactttttcgccagcttttcgtaagtaccgtcagcacgcatttcagcaaaggctttgttcagcgcttcgcgcagctcgttatcctctttgcgcagccccataccggttcctacgccgaataacttctcatctttcaccgccgggccgccgaatttatagtcttttccgacgggctgtttaaggaaaccttcgctggccgcgacctcgtcctggaacgccgcatcaatacggccagccgtcaggtcggaataaatgttgtcctgcccctggtaagagacgatctcaatccctttcggcgcccagtgctcattgccgaaggtctcctgcgtcgtcccctgtagcacgccgacgcgcttgcctttcagcgacgcgacggtcggctgaatatcagagttcttcgccaccaccagacgggaatcagcggcgtaaagcttgtcggtaaacgcgatttcctgctggcgcttttcagtgatggacagcgaggacatgatggcatcaattttcttcgcttttaaagacggaatcagcgcatccagcgggttttccacgaacgtacactgtgtgttgatacgtttgcacagctctttggccagatcgatatcaaagccgaccaattcaccttgtgcatttttggattcaaacggtgcgtatgtaggatcggtaccgatgcgaatcttttgtggaatagcggcaaatgctgcggtagcgctggaaaatgccagcaccagagaaagggataacgccagttttttcataactatcctcaacagactgtctttccaggagatctttacagatccgatgcgactatcgtgccattaatcaggccgacaaggcaaagcattctaccttgtcagccggtttattttgcataaaaatcgattaagtatgcatttatgcgcctgttccgcaacggcttatgcaccaaaaaggtgcaaaacatctattttgcaccgtgatagttccccagcgcggcgcgttatccccttccctcaatcgccgtaaacattaaaatcgaagtactttttggccattttgtcgtaagttccgtcctggcgcagttcggtcagcgctttatcaaacgcggcttttagctcggtatcatctttacgcagcccaacccccgtcccgtcgccaaaatattttttatccttcacggaaggaccggcaaacgcatactctttgcccgctggctgcttcaggaaaccttcgctggcggcgacttcatcctgtaatgcggcatccagacgaccggcggttaaatcggaatagataagatcctggttggcataagccaccacatccacacctttagtgcgccagttatcattggcgtaagcctcttgcgtggacccttgcagcacgccgacatgcttgcctttcagcgattccagcgtcggctgaatgggagacccttttgccgcaatcaggcgtgaatccgccgcgtaaagtttgtcggaaaacgcaatttcttgctggcgtttatcggtgatagagagcgatgaaataatggcatcaatttttttcgcttttagtgagggaataagcgcatcaaagtcgctggcgacccaggtacatttcacctgcatacgcttacacatttcattaccgagatcgatatcaaagccaataaactcgcctttggcatcttttgatgagaaaggcgcgtaggtggtatctgttccaatacgaaccgtttgcgggagcgcggcgtaactggccgccgtcgcgcccagacctatcagcaaagacaaagcgagaacggtcttcttcatacatacccctcaagtggcgtcattttcttatgttttacgtggcgttgtgtgtttgcagactttttcatgcaggtcttatgccattttcacgtcagcaaaacgattcgacgttaaatttgttaataaaacgttgcaatattgtcctgatgttgaagatagcaggtatgacggttgaaccgcagcgtttcggcggcttttaacgaattaaatgttgaggatatgatcgcggttacaaaattgccctgaaacagggcaacagggacaataatgcacgctaaacagacaacgctatgcgccctgccagcgaacaaaaagatcgtgcggaagggggatatcaaactgatccagcactcggttaaccgtttgatttataacatcatctaacgtctgaggaagatgataaaaagccggaaccggcggcataatcaccgcgcctatctcagcggcctgggtcattaaacgcaaatgcccgatatgcagcggcgtttcgcgcacacacagcaccagaggtcgccgctcttttaatatcacatccgccgcgcgggtaagcagtccgtcagtataactgtggacaatccccgacagcgttttaatcgaacagggcaagataaccattcccgccgtcgggtaagagcccgaggaaatgctggcggcaatgtcgcgcgcatcgtgcgtcacatcggccagcgcctgcacctcgcgcagcgaaaaatgggtctccagcgccagcgtttgccgggccgcctggctcatcaccagatgcgtttccacgctatcgacatcgcgcaaaatttgtaataagcgcacgccataaatcgctccgctggcgccgctaattcctacaatgagtcgtttcatgttctcttaccgtttacgagcgccgttcatcccactgtgttacgtaatcggctcaaagtgggtctgaagagataccatgacaaaagaatccctatcataaaagccagctcaaccaacattatcactaccccctgctcactaaaccaggtgccgaccataatggcaaaattggtgataatgacaaatcgggccgtccaggggaaaagcggcgatcgatagcgtagcaaatcgctggcgtacgttccattacgcaccgattgtcggaagcgatactggcaccatccgatggttatccatgccaggcaacccacctgcccggtactggcgatcagatataaataaaattgctgtgcgggaatatagcgggtcagcaacgacactaacgccaacaaggccgtgattaaaatagcatacaccggcacgccgccgccgttcgttttaccaaagcaggctggcgcaaagcgatcgcccgccatagaccacagcatacgcgaactggcgtaaatggccgagttagcggcagaaaccgcggcggaaaagatcaccagcgtcatcagcgtatccgcccccggaatgcccgcgtgggagaatacccatacaaagggactttgtccatttggcgtcagttcatgcggatagaccagcgccagcaccgcaatcgccaggccgtaaaacaaaatgattctgagaccgatccccaggatcactttcggtaaaataatgtgcggcgattcggtctcccctgccgcatttcctaccagttccaccccctggaaggagtaaatcacgatcgtcatataaaccacaatttgctcccaaccgtggggaaaccacattccgtctgtttttaacgtcgggtgccagtcactatggcccattagcgagtagatcataaccccgcccgcgcaaataaacagcacgatcgcgaaaaccttaatggccgaaagccagtattcgcattcgccaaaactttttgcggaggtgagattgatggccgtcaggatgagcagaatcgccaggcagaacatatataccggaaccgcggggaaaaactggtgagcaataaaccctgcggcagtgaggtcggccgccagggaaaagacccagctaaaccagtaaagccagccaatggtatagctccagcaaggtgacggcataaacatcagcgcgtaatgttgaaatgaaccggagtgaggaaaggcgcatgataattcgccaagacacatcatcgtcgccagcataatggttccggcaaacagataggccagtaaggttcccgccggcccgacgctgcttaacggttcggcaatgccgataaataagccggtgccaatcgtgccgcccagcgacatcatcagcaggtgccgcttcttcaggttacgccgcagaccgccttcaggctctgctggcggagattgttgcagggtatccatcgttactccctgtctttcgtgaggtcaaagatgccgccgcgacatagccgcggcggttatgcgttaacgcgtaaacctccaggcgacgcctttggtctggcaggccattaacaggcccgtataatccagctcaaagcgaaccacatcgcctacttttagcgactgacgacaatcttcaatatccaccagcgtatgatcgctggtttgtcctaagatagtgatagcgtcgtcgcatggcacacagttatccgacggcacatcctggcgaccaaacgccagcaatgcgcgtcggcgtatgccacgatcgacaaaggttttactttgcaaaaaggcatcgacgcccagctccccgaccgggacggtaggtttactgttcagttcgatgatttccgcttccaggatatacatatcggaacaggctttatcgaccggttttgcggagtggtgaaattcattcaggtatttcatgtccacatattcaatgccgaattcatgcagtccgccgatgcgcagatgattcagtccctgcggccagatacctttatccagcaggtgatagctggtgcagtttcccgcagaaagccgccggacaggaataccgctgtcagcttccagccgggcggccagcgccagaaaatcctcgccattttttaccgttggcaacacggtgccgtaacaattaaagttggtgcccagtccatataattccagaccgggcagaccagtaatcagagtcacggtctcaagaatgcgttgatattcaccaaaccagataccctcgcgtaaatcgcccatatccaccatcagtaatacctgatgcgttttcccctggcgttgggcttcttgcgataatgcccgtaataccaccggctcgctatttaaactaatatccgcgtagcgcaccacatcttcgatttcactcagacacggactgcgtaacaggcaggtcgtacatcctgtctcgcgtatttttttcaaattataggttcgtgattcagcgataacggtaattccgccgttgaacaccgcctgcgcggtttccacgcagccgtcaaaaactttattgacagccatcacgtcaataccgctacttgccagcagagctttttccgtgcgggcgttttcttccagcttgcgtagatttatttccagaactggcatatacattttattttcctcccgccatgcttaaacgggcattacgtttctgcgcccgatggtaaatgtactccgcgacgacaaccgccagcacggctccgccaataattttcccggcgtactggaaatatccgcccatatcaatttgagaaggcggaataaataacagcgcaacggcaaaggcgatagaaagaaagcccagcgcgggtaaaatagccggtaaaaccttgcccggaattttaaaacttcttggcgtatccggctgagtcttacgtaaacgccagaacgctgggaacatcaccaggtaaggaataaaataggtgatggtcgttagcgccgttaacatccagtaagccgccgcaacgcttggcgaaataaaagtcgaaaaacacaggaccgtgacaataatcgcctgtacagtcaaggcaaaggcgggcgttttccacaccggatgtaatttgccgattcggtcccccagcagattatcttcacgcgaggcttcctggagcatataaatcggccccaccagccaggagttaatctgcccgagagcgccaaaaaacatacagatggccataacaggaattaaccacggcatatgcagcgtatccgcagcagcatgcatagcctgcatgacgcctgccacgatgtcggttttcccggcgggtaaaagcgtatttagcgcccaggtgccgaccatatagatcccgacgataacggcggcggagacggccatcgctcgcggaaaatcacgctgtggattacgggtacgcccggcaatcatcggggcgacctccagtccggcaaacgcaaacatcatgctggataagaaaacgatcgtatcccagtgtccgagatccggaatccagtttttcgctgtagtgtagtccgtctgcatctggtgtccggtacatagccatactaccgccagcaaaatgaggatggcggagggaataaatacgccgcaccaggcgctgatgctattaataatttttgtccattccatcccgcggatattcatcagcgttaatagccagaaaattaccgcggaaccaataccgataaacgctttattttccgccaggccgccgccgatcatatagcccaacgcggtaaagccgaattgcagcattaatgggaaaaacagtacgcaggaaaagagaaaacaaaccacgacaatccatgcaatacgtttaccaaatgcctctttaatccagacaaatatcccgccatctttcggccagccggttgacagctcgccgcataccatcgctaaaggaaaaaacaagcagaatgcggcgatcacccataacaacatggccgatgccccgtaaggcgccacgttagggatttgccgcaaactcagaatagcgatgacattcataaagacaatgtctttgatgccaagtaagccagaattcgtgttactcatggccatctcctgttatgcattcaggcatcactgccctcttcttatcatctgacgacgggcttcagcatgaaactgaagcccaaaacagtattaataaatgtcgtacttgaccatatcttcgtaactgtcttcccgacgaatcagacgcgtgtcaccatttttatcgatcatcaccacgcccgtgcgcggacggttgttataaacggtttgactttcaatggtgtatgccccggcatcaagaaatgcgacaatatcgccaacatgagtctccttcggcagtaaaaactcttcgcctttcactcccatgtggaaataatctccgccatcacacagcggcccggctaattttatccaggcgtcgtgcgctgccgtcatgcgagaggcgttatagacataaaagaaccagtcaaaatgctggctgtcagagagtacgctgtaaccagcgtcgacaaatttccattcaacgtggcattccacattgccgttaagatcgtaatttgttttacgtttttcgcaggagacttccgtaagtaaaaccgccgccgacccggtcactttacgtcccggttcaatacatatttccacatcggtacgccatttatgcacttcgcgaatgaccgcatcggcaaaatcctgggcggtaataccggcatacatattatcttttaacgggtcgccattctcgtcgtcatatttatagggaaccggaattccgccgcccacgttgatcaaatcaaatttaataccaagcacctcttccaggcgacgggattcatccaccagcactttagtcgcttttgcgaaaggctctgactccggcacctgatcgcccacatgcatatgcaagccgcgcaaatgcacataaggcatcgccagaatgcggcggcaggtttcttccgcctgttccaggtcgagacccgacttcgcatggaaagcggtaaccagttccgcatgcgtcgccgagggaacattcggttctacgcggacgcaaacattggcgactttcttcagcttgcgagagatggcatcaatatgttccagctcatacaggctatcaacattaataagatacagatcgttggcgatggcatattccagatcggcaggctttttcaccacgccgttgaagacgatctgatcgccgcgaaagcctatctccaggcacttgcgaacctcatattgtgagtttgcctccgcgcaaattccggcgtcacgaatggctttcaacacccccatgaccgagcaggtttttgacgcaaagaaggttttggtatttttatgcgccgcaaatgcctgctggatttcatgaatgttacgaataatctccggctcagaaaacacatagaacggcgtggggtactggcgcgccagagcgtccagatcgaccccttcaaaacacaaatgaccgtctttgtgctggaaacggcgatcgccgttgattacctgctcacgtagctggttgtaattctgcataatcgagtcagtcataacgccctctgcttaatgtttatggtaaaaatccgcattctttacagggataaagcaaaaggcatgccactattttttatcaaaataatcaattagttataaaaataagctttttctcattttcgtcattgagtttgctattcatcacaacgacgaaaattcgtcacttttataatgacaacatgaacaatagatatgaggaatgcatatatggcatccaccaatcaggagctggcctcggcgctcaggatgttttcccgctttttcgatttgattcatcagccgttggccgtcattaatgagcgtggtgaatacgtttactacaatcaggaaagcgcggatctggacggctatagtattgaacgggcaatgggaaaacatatgctggatgtctatccgggcatgaaagagacgcaaagtacgatgctttcatcgttaaaaaaaggcgtggaatacattggccattatcaaatttattacaatgcgcgaggccaggccgttgactatcagcacaccaccgcgccgctctatgcaagcgatggcggcatggtcggcgttatcgaaatcggcaggaatatgtccggcgtcaggcggctccaggagcaggtggtagaactgaaccaactgctgtatgccgatcaccatgagaagcaccatgccattattaccgaaaatccggaaatgctcagtaatatcgccaaagccaaacggctggccgccagtaatattccggtgacgattgtcggggagacgggaacgggtaaggagctattttcccgcctgatacatcaatgcagcaagcgggcgaataagccatttatcgccctgaactgcggcgctctaccgcctacgcttatcgaaagtacgcttttcggcaccgtgcgcggcgcctataccggcgcggaaaatagccagggctatctggaactggcaaacgggggaacgctctttcttgatgagctgaacgccatgccgatagagatgcaaagtaagctgctgcgattcttgcaggataaaaccttctggcggctcggcggacaacagcaactccactctgatgtcaggatcgttgccgccatgaacgaagcgcccgtcaaattaattcaacaagaacgtctgcgggcagatcttttttatcggttgagcgtcggaatgttgacgttaccgccgctgcgcgcccgcccggaagatattcccttactggcgaattattttattgataaataccgtaatgacgtgccgcaggacattcacggattaagcgagacggcgcgtgctgatctgctcaatcacgcctggccgggtaatgtcaggatgctggaaaacgcgattgtacgcagcatgatcatgcaggaaaaagatgggctgctcaaacacatcatttttgaacaggacgagttaaatttaggcgtaccggaaaccgcgccggaaaatccccttccctcgtcacccgatccgcagtatgaagggtcgctggaggtacgggttgccaactacgaaaggcatttaatagaaaccgcgctggatacgcatcaggggaatattgccgccgcggcccgcagccttaacgtatcccgcaccacgttacagtacaaagtacaaaaatacgctattcgcttcggcgtggtgcgtaattgacatcggccagcggcattgcgccgctggcaaagccattagccttcgttatgcatttccaggttttccatttcgttctggaacagcaccgctttggcgtcgtcattacgtaatgaatccaggaagtcgaggtattgctggtctacgtctttggtgacatatatcccgttaaataccgaacactcaaactgctggatatccggattttccgcgcgtacggcttcgatcagatcgttcagatcctggaagataagcccgtctgcgccgatgatctgacgaatctcatccacctcgcgaccatgcgcgatcagctcattggcggtcggcatatcaatgccatagacgttggggaaacgaatttccggcgcggcggacgccagataaaccttcttcgcgccggcttcccgggccatctcgatgatctgctctgatgtggtgccacgcacgatggaatcatccaccagcaggacgttcttatcgcggaattccgcgcgattagcattgagcttacggcgcacggatttacggcgtagctgttggcccggcatgataaaggtacgtcccacgtaacgatttttgacaaatccctggcggtacggcttgccgagaatacgggcaatttccagtgcgatatcgcaggaggtttccgggatagggatcacgacgtcgatgtccagatcttcccattcacgagcgattttttcgccaagtttggtgcccatattcacacgagcgctgtagacggagatcttgtcgataaaggagtccgggcgagcaaaataaacgtactcaaacagacaggggttactgaccgggttatccgcgcactggcgcgtgaacagttgccccttttcggtaatatagatagcttcgcccggcgcgacatcgcgcagaaactcaaagcccagcgtatccagcgccacgctttcagaagcgaccatatactccgtacgaccatcgccaacgtcacgcttgcccagcactaacgggcgaatgccgtgcggatcgcgaaaagccaccatgccgtggccgataatcatcgccacgcaggcataggcgccacggatttgacggttagtcgcggcaatcgcggcaaaaatattgtcggcttccagcggatagtgacggaagttgtcgagctcgctggcgaaaatattgagcaggatttcggaatcggaggtggtgttgatatgacggcgcttttcttcaaacagctttttacgtagctcgtgcgcattagtcaggttgccattatgggccaacgtgatgccatacggcgagttaacgtaaaaaggttgcgcttccgaagcgctggagctgcctgcggtagggtagcgcacatggccgatccccatgttgccctgcaaacgctgcatgtggcgagcttcaaaaatatcgttcaccagcccgtttgccttacgcaagcggaagcagttattcgcatcaatggtgatgataccggcagcatcctgaccacgatgctggagcactgttaacgcgtcataaatcgactggttgaccggcataacaccggcgataccgacaataccgcacatacgtcattttcctcgttaagccacatctcagaacctgttacgtcctgggcaagaaactcgacgagctttgcagatagtcaaagaaccatctgatgatgaagctgaactgcgggatgagctgcgatttgctccagtcttcgcttttcgacaagccggtaaaggtatcaaggaagaacagaatggcggcgacaatcagcgcgcctcgcagtgcgccgaaacagatccccaacacccggtcagttcccgacaggccggtcttttctactagctgacctatcacaaaattcacgatagcgccgacgataagcgtcgcgataaacagtaccgcgatagcaatcccattacgaaccagttcgtcttcaaagcccgtaaaccagacagacaggtaagtgtagtagtgactggcgacaaagaaagcacaaccccacgtcaccagcgataacgcttcacgaacaaagccgcggatcaggctaaccagacaggaaaaagcaatcaccgcgataatggcgtaatcaatccagaccatagatgtcccacgattttacgccctgtcgtcctgttcggggcgcattctaacagaaaaagaaaacgtttgcgtagggatttccttcccacgcgtaaataaaaatggcgctgaaaaaatattcaacgccatcacactttttatctcttcgggcacgaccagaagagctgccatcggcctgataagcgcaggatacccggttcattccttctgccggatggcggcgtaaacgccttatccagcctacagaacttcggctattaccagatgaacaccgtaggccttaacgctgcgcgctcaggcaaaacgcgccttagttcgggctatatcccatcaccacgccgcttaacccggaaatctgcttgagctcgccaagcgatcctttcatcttatctttcgacgcatccggcccgacgagaatacgggttattttaccctgtaccggcgttgagggggaagtataaacccggaacccggcggaacgaagcttgccgactatctcgttgactttatccgcgtttttcagcgcgcccaactgtacgacataggctttgccggtcggcgcaggtttatcgtcggcgactggttgcggcgcgggcgtcggcgtggaagcggcgacaaccggctgttgcggtttaggctgcggcttcggcttttcaaccggcttcggtttaggcgtctccaccggtatcggatcaagctcgacattgttagacgccatgcgcgacgggtccagcgacggcgctgccgcatctcccgcccgcacctcttcagccgccccttccggcggctgtgtcggcagcgcctgcgttgcggcaggcatcatatccggctcatcgcggtcgccaggcttcggtaccagtggaatcgcagcaaattcatcctgataatgctttttctgtccgtccagcagaccgggaagcacaataacccccagcgcgactaacacaatcgtgccgactaaacgattctgaaacttactcgccaccgattctccccgcgtctatcacttccataacatgtgcgacggtgtggaacgatccgcacaccagcacggtatcttctggctgcgccgcgtcgatagcggcctgccatgcctgcgcgacgctatcatagacattccctttccccagatgttccagaagttgttccgccgtcgcgccgcgcggcccctctaacggagcacaataccagtcgtcaaccacgcttttcaaccaggctaacgtgccggcgatatctttatcatgcagcataccaatcaccgcaagcacgcgcccgcgtttcggcaacattttcagacgacccgtcaggtattccgccgcgtggggattatgggcgacatcaaagataacgcgcggcgactcactcacgatttgaaaacgtcccggcaaggtagcctgcgcaataccgtcgcgaatcgcctgctcgtcaatattcaacctgctggcgcgcagcgcggccagagcggtggcggcattcggctgaggaacctgcggcaacggcagtccggcaagcgtgccgtcgccatcggtaaacgcccagtgggtcgctgtcacctcataacgccagtcaacgccgcgacgccgcaacagcgcgccggtctcctgcgcgacatccgcgatggttgccggcatttccggttcgccgacgatagcgggtttttccgcacgaaaaatcccggctttctcgcggccgatactttcgcgatccggccccagccagtcagtatggtcaagcgcgatgctggtaattaccgctacatcggcatccacaatgttcgtggcgtccaggcgcccgcccaacccgacctccagaatcaccacgtcaaggttagcctgtttaaacagccacaatgccgacaacgtgccatattcaaaataggtcaatgaaatatcgccgcgcgccgcttctatttccgcaaaggatgcggtatgcgcggattccgctaattctttcccctgcacgcgcacgcgctcggtgtaacgtaccagatgaggcgaactatagacgcccacacggtatcccgccgcgattaacaccgactccagcgtgcgacaggtcgtacctttgccgttggttcccgcaacggtaaaaacgaacggcgcaggcttgaggatgtccagacgcgctgccacctggcttacgcgctcaaggcctaaatcgatactcttgctgtgcaggttttccagataagaaagccacgaggccaggggcgacgcagcttgaggtatagatttgtttttcattgtttacgctgcttctttacggtgaaaagcaaaagggcagagcctgcggccctgcccttttcagttatcaggcctcagactcctgatccggcgccggaggcaccaccacgccttcacgcggggcgtccgggttcggcgcgggcagattcatcagcttcgccagaatgctcgccagcttcaggcgcatttccgggcggcggactatcatatcaatagcgcctttttcgatcaggaactcactgcgctggaatcctggcggcagtttttcgcgaacggtctgttcgataacgcgcgggccggcgaagccaatcagagcttttggctcggcgatgttgagatcgcccagcatcgcaaaactggcggaaacgccgcccattgtcggatcggtcaataccgaaatgtagggcagaccacgttcctgcattttagccagcgccgccgaggttttcgccatctgcatcagcgacatcagcgcttcttgcatacgcgcgccgccggaagcagagaaacacactaacggacagttgtcttccagcgcctgttcaacggcgcgaacgaagcgtgcgccaacgacagaccccattgagccgcccatgaacgcgaattcaaacgcggcggcgacaaccggcataccgtgaagcgtccctttcatgaccaccagcgcgtctttctcgccggtttctttctgcgcggacgccagtctgtctttatattttttggagtcgcggaacttgagcacgtcttttggctccagctcgctacccaactccacaagggaaccttcatctaacaggctatgcaggcgattgcgcgccgacatgcgcatatgatggtcacacttaggacagacctcaagattacgttccagctcagcgcggtataaaacctgaccgcagctatcacacttggtccacaccccttcaggaatgctagccttgcgggtgggagtaatgttgcttttaattcgttcaatccagctcattggtgacctttctgcctgaaccttagtcagctttattataaggggcgcataatgccatttttgcccccaacagaccatgaatgttgcacattaaaacataacagcccgaaactttggataaaaaagtggtcgaaccgctgagttactttctattttgcggcacgcgacgcagcgcgcttatgccggacaatctcaatgacgccaggtaatatcgaaaccacgataatccccacaatcagcagcttaaggttatcctgaatcaacggtatcgtaccgaagaaataaccggcgtaggtaaagagcagcacccacagcagcgcgccgatgacgttataggcggcaaaatgccgataggacatgtgccccatccctgccacaaacggcgcaaaggttctgacgatcggcacgaagcgagcgagaatgatagttttaccgccgtgtttttcataaaactggtgggttttatccagataactacggcggaaaattttcgaattcggattactgaacagtttttcgccgaacagtcgaccaatcgtgtaatttaccgcatcgccgacaattgcggcgatcagcattaacgccaccatgacatgcacattgagatcgttggtttccagcgaagccagcgccccggcgacaaacagcagcgagtcgcccggcaggaacggcgtgacgaccaggccggtttcacaaaacagaatcaaaaacaaaatagcgtacacccagacgccgtactccgcgaccagctccgccagatgcacatcgatgtgcagaataaaatcaataataaagtagatcaggtccatatttgtctttgcctttctacccgacacgtttcgggtgtgcgattcggattagtccgccagaaatagcgggcccattggcggttttggaaggtcaaaccggtcagggtaatccaccgcaaccaaatatagcccttccgccttcgccgttgccgccgccagcgttctgtccctggccgctaacagctctgcgatccagctctccggctggttgtgagcgcctacttccagcaggctgccgacaatattcctgaccatatgatgaacaaaggcattcgctttgatatcgaccaccacataagggccgtggcgggtaacgttgatgtgcatcacattacgccacggcgtgcgcgactggcactgcactgcgcgaaacgaggtaaaatcattttcgccaagcagacactgcgccgcgcgatgcatccgctctgcatccagcggctcatagtaatgcgtcacgccttttgctaataccgcaggacgcagtcgatgattgtagatgatatagcgataacggcgagccgtagcgctaaatcgcgcgtgaaaatcatccggtacagttttcacccagcgcacggcaatgtcaccaggcaaattcgcatttacccccagcgtccatgccgcatctttgcgcaatgcggtcgtttcgaaatggacaacctgcccggtgccgtgaacgccggcatcggtacgcccggcgcagaacacgttaataggttcatttgccacctgcgagagcgctttttccagcttttcctgcacgctgcgcacttcattctgacgctgccagccataatacttgctgccgtcgtactcaatacccagcgcaattttatagaccgccgatgattgctgtccggacatcagtacagatactcctgcaccagcttctccgcaattttaacggccatcagcgcgccgccgaaacgcacgttgtccgccactgaccagaactgaatttgttccggcataccgtaatcattatgcacacagccaatagagagctgtggattgccggaagcgtcgcccacctgcgtcgggtaatccgtctcttctgacagtacgatatcttcaccgcgggaaaatgcctcgcgcgcctcttccgccgccagcggacggagcgcttcaaagctcaccatctgcgcatggccatagaacaccggcgactgcacgacactggcggagatcatcacgccatcgtcctgcaaaattttacgcacttcatcgacgatacgacgttcctggcgcacgctgccttcccgatccggcagcagcggcagcatattgaacgccaactggcggccaaagaaatcatcttcatcaatcggtatgccgttaagcaacttcgcactctgtccggccagcgcatcgaccgcttttttcccctgtgcggacgctgataacatactggtgacggcgatgcgcgacagtcccccctgatcgattaacggcttgagcgccgccagcagttgactggtcagactatcggcgaccgcaatcacgttacggttacggtaatccgccagtacatacgggttaacttccggcacgaccagcggcacatcaggctccagcgcgaacagaccgctggaatctatcaccaggcaacctgcattagtcgcgtcgtctatccaggcagccgatgcctctgcgccggcaacgaaaaacgccaactgcgcctgcgtccagtcaaagtccgccgcatcctggacaatgaccgacttgccaccaaaacggaggtgctcgcccgcgctttcatgacgcgccaacgcataaatttcaccgaccgggaactggcgttcagccagtgtttcaagcagggcttcgcctacggcgcccgttgcgcccagaatggcaatgttccagccttcagacatggtgatttactccagaaatacataagcgtccctgtcgcattattcgacagggagcattaagaagacattaatgtgccgggtgatgaacagcgttaaaacctagcttacacagcaaggcggctgccgtttcgtcgtcacacatcacgtataaagacgaccattcacggcgctcaagataatttttacgcaatttatcaaattcacccggaattccagcgactttacgcagtggcgcatcgtcgcggcgcacatcatacaccaaatgcgccagtcttttcagcgtcggttgatccagcgggccatgaagcgtaatacgaccaaactcaggcgcaggcagtaatgtctccagcgcgacacgctgctcgcgaccgataaacgcgctatacgcctcaaagacctgggtggtgccgcgcgctttgccttccagcgtatagccggcaatatgcgacgtgccgatatccacggcttccagtagcgcgacgttaagatccggttcgccctcccacacatcaagcaccacgctcagcggctgcccggcattaagtcgcgccagcaacgcggcgttatccaccaccggaccgcggcaggcgttaatgagaatggcgccgggtttcagtcgacggatcagcgtctcatcggccagatgcagcgttttgtacggtccgtctttatagagcggcgtatggaaagtcaggacatccgcttcctgcaccagctcatccagcgtacgaaaatcaccctcgtccccgcgtgcggcgcgtggcggatcgcacagcaacgtgcggatacccaacgcttcaagcctggtctgtagccggcttccgacgttacccacgccgacaatccctatagtgcgatcgcgtaacgaaaagccgtcacgttcggccagcatcaacagcgcggaaaacacatactccaccacggcgatagcattacagccgggcgcggctgaaaaaccgatgcccgcctgcttcagccatgcctcatccacatgatcggtgcctgccgtagcagtaccaacgaagttaatcggcgtgccgctcagcagcgattcattcactttcgtgaccgaacgcaccattaacgcatcggcatggttcaattcttcaacggggatcgggcgacccggcactgcctttacctcacccaggcggctaaataattcgcgggcgtaaggcatattttcatcaacgagaattttcacgactgtcgtacctgtttgagaacgagagttaaccggacaagtgtgccataatctggccgccaggcatatattgctcagatttatggttaaaggataattaattatgcatcccatctccggcgcccctgcacagcctccaggcgaagggcgtaatcctctttccgctgcgagcgagcagccgctttccatgcaacagcgtacggtactggaaaggctgatcacgcgcctgatttcactgacccagcagcaaagcgcggaagtatgggccggaatgaaacacgatctggggataaaaaatgacgcgccgctactgtcgcgccacttccccgccgctgaacagaatcttacccagcgtctgggcgtagcgcagcaaaatcacgccaatcgtcaggtgctttcacagctaacagagctgcttggcgtcggaaataatcgtcaggccgtcagcgattttatccgtcagcaatacggtcaaaccgcgcttagccagcttacgcccgatcaactcaaaaacgtgctgacgctcctgcaacaggggcagctttccattccgcagccgcagcaacgtccggcaacggatcggccattattgcctgctgaacataatacgttgaatcagttggtgacgaagctggcggccgcgaccggcgagtcaaacaaacttatctggcaatcaatgctggaactctccggcgtgaaaagcggcgagctcattccggcaaaacagtttacccatctggcgacatggctacaggcgcggcagacgctgtcactacaacacgcgcctacgctacatacgctgcaggctgcgttaaaacaaccgctggaaccggacgaactcacagcgatcaaagagtatgcccaacacacttatcaaattcagccgcaaacggtgctgaccaccgcccaggtgcaggatttacttaaccatattttcctgcgtcgcgtagagcgggaggcggatgagctcgaaccgctctctattcaacccatctaccgcccgtttgcgccgatgattgaaaccgtgaaaaatctgtctgcgcgaccaggcctgttgtttatcgcgctaataattgtactggcgcttttctggctggtttcttaaccgcgccggaacgataatatcgtcaccaggatgccaaccaccgcggagatcgctcccgcgaggaatacggaaggatagccgtatgacgtggccagcatgcccgccagcgggccggtaacgccgtaggagatatcctgaaacgcggcgtagccgccgagcgccgtaccgcgtacctgtgcaggtacgcgtttcacaacctccacgcccagcgccgggaaaatcagtgaacaccctgccccggtgagcgccgcgcctaccagcgctatccaggccgtcggcgccagccacaagagcagcaaccctgccgtctcaaccagcaatgagacaacggcgaccttcacgccgccaaagcggtccggcatccaaccgaacaatatgcgcatcagtacaaacgcaccgccaaacgcggtcagggtgaatcccgccatcgtccagccattgctgacaaaataaagtgaaataaacgtaccgatgacggcaaagcccacgccctgcaatgccaggcccaggcccggtttccagataagcccgaccacgctccacagtgaaggtcgctcccccgtatacgcaggcactttacgcacggtgccgttgaatgcccaggccagcagcggtaaaaccatcgtcgtccccgccagcgccgcgaagccaaagtggctatggatcagcaagcccaacggcgcaccggccgccagcgcgccgtaaatcgccatcccgttccacgacatcaccttaccggaacgcgttgggccaaccagccccagtccccaggtcagggttccggtcagcagctggctttcgccaaatccgaggatcaaacgcccgacaataagcagcgcgaattttactggcgcggaaaccggcaacagcgcggccaggagccaggcggcgcccgccagcccgcaggcaagcatcccctgtaacgccgatcgtttagcgccatattgatccgccagccgtccggcatagccgcgcgtcagtaccgtcgcaaaaaactgaatgcccacggcgatcccaaccatcgtattgctatagcccagttcgtgatgaacaaaaagcgggatgacgggtaacggcaggccgaccgtcatataggtcaggaaaaccgcaaaggcgatgcggaacagcgaaaaattcgcagacggggtcgttgttttttggctaactgctgtcatgcattactccagaatgcagagtaaggcggggaaaggccacgcccccctctacctgaacgtcaggattaaggtgcgttggataacgttaaacgcttacgcattatcggaaggataatgtagaaagtgaagtctgcctgtgagacgcgaaacttgtcaaccttgaaattgcagccagggtatcaacgtggcggcgtgtcatcaaacagaaagggaaagaccgctttcatccctctcaccttaaaccgtccggtcacctgcttgcgctgttctggcgtcagtaacctgaacatcatctcccagatatcttcaggctccgcttcctgtaaggaaatgggttccggcgtcggttcctctccgctgtcgtccagataacgatgaacataaagagggaaaacagatatatgaaactcctcggcctttgatttaacacgcttacgcctgacaccctctttcccttcgctgtacttatacaaacgttcgcgaaccgcaggctcgcttcccggaaaccccggtaagccaagacattccttaaccgtgaaccattcctttgccatcggtttctttcctttcccctgatgaaataaaaatatttcttctttttcgcgaaattttgctttctttctggcactattctcagagtgaaaaagaaagtaactttctttttctcgcgctaatttttaccttaaaaatatcggtgccgataacacatcttcttaggattacagaatggaaccaaaaagccaagactggcatcgtgcagatattaaaagtgcacttgaaaaaagaggtattacgctcagagatctttctcgtcaggccggtttatcacctgattcactgcgcaatgtctttacccgttcctggccgagagctgaacggattattgcggacgcgctgggcatcacgccgaaagagatctggccgtcgcgctatgatgatatgcaaataaaaaatgatgccgatatcgcagaataatagttaatgctgaataaattggctttaacctatcaatctcaacaattaataaatatttaaacttattatattgaaaatagtaatagcactatctgtcatgcttcccgaatcaaatactgttaaagcattacgtcattgctattacgtattttattaacaggaatcattatgagttgggataaaagaatggcggttaattatgccaaaacgcatgcaggttctcattctcaaggccggtgtgcggaatttacccgaaaggcaattcaggcgggcggtatcacgctggggcatacatatcatgcgaaagattatggcccaatgttaagaagcgccggattcaccgctattggtacctatgaaatgccgcgcgagggtgacgtcatcattattcaaccttacgctggcggaaacccgagcggtcacatggcgatatacgatggcacagagtggtattcagattttaaacaacgcgatatgtgggccggcccgggctaccgggcagccaggccctcatataccatctacaggaagaattaatgaaaacgttctcccttgtcgcgcttatcctgttgctttgtagttgctctgcgcctcatcacgacagtacgcaggccgtgaagcagttctatacctcatggatgacgacgttcacgaacgatgtgaatacccctgacgacaccaccgccttaatgcaacgttacgttgctaaagaggttattcatcgcctggcgctaatacagtccctttatgaacaggagattgtgggggcagattattttatgtatgcgcaggactatgcgccagagtggattccacagttacgggttgggaaggcacaccctttcctcggcggagaaaaagtggatgttctgttggctacagagtcaacgcccatccacctggaagtttatacccgttgggaagagggacgctggaaaatttaccgcgttcgggatgctgacaggggttatgaacagccgatttatgacgcaggcgccatcacccaggctgaggcctggtcagcgaaagtcgcgccggaatataagaagcattaaaaaagggaaccgccatcggtctcttgttcgtaccggagaggttaaagcgcctcttgcatcaggctcttattccgtcgctgaaaacagtaagccgaaaacaacccaggcattatttaaaatatgaagtattatcggtatcattagcccacggcttctcattcgaacaacgcataatatcgatgaaaaaacaaacagataaacaaaagtcaccgcaaagagatattgtgtatgcataaatgcaaaagcgagtgaagtaataataataccggaagctcttgagtaccgaccccaaccgatactgctgtttaataaaaaccctctgaatataatttcctccgccacaggagccagaaagcacatcgccagcgtgttaagaaatttatgaagaaaaaattgccttgataactcggccatccagggttccgggccactaaaagcattgtagagaacggtaaggcacaccagggccagcgccggaacaaaacactccacgaatgataagcgacccaatgataaaaacgggtaatactttgaataaatactccaggcggcaatcgcatagacaaaaacaatactatatataaaaggcgcagccagacctcccaaataaagccaggcataggaaggcgaaaatgaggcaaaaacaaaaatgccgaacaaaccaaataaaacagccacacaactcaaactatgcctaattttatctaatgtattagttggcatttatataatatccatataatttgttgttccctgaatgaaaaaacaggtcgcattagcgacctgtttcattgttgatactacaacgtaatagtcaggcttacaacttacgcatcaccagcgtggcgttggtgccgccaaaaccgaagctgttagacattacggtagtcagttcacgctcggtcgtttcggtcacgatgttcagacccgcagcctgctcatccagctcttcgatgttgatgctcggcgcgataaaaccgtgctccagcatcagcagagagtagatggcttcctgcacgccagccgcacccagcgagtggccggtcatcgctttggtcgcggagatagccgggctgttatcgccaaacacttcacggattgcaccgagttctttcacgtcgcctaccggagtagaggtaccgtgagagttcaggtagtcgatcggcgtgtctacgccgtgcatcgccatctgcatgcaacgtactgcgccttcaccagacggagcaaccatgtctgcgccatcggatgttgcgccatagccgacgatttccgcatagatatgcgcgccgcgcgccagagcgtgctccagctcttcgacaacaaccataccgccaccgcccgcgatgacaaacccatcacggtgcgcatcataggtacgggacgctttttcaggcgtatcgttatatttggtggacagtgcgcccatcgcgtcgaactcacaggccatttcccagcacagctcttcgccgccgccagcaaaaacgatgtcctgtttgcccagttggatctgttcaaccgcattgccgatacagtgtgcggaggtcgcgcaagcggagctaatggagtagttcacgccataaattttaaacggcgtagcgaggcaggcggaaacgccggatgccattgctttcgtcaccacatacgggcccacggctttcaaaccacgcgggctacgcatggcgtctgcgccaaagacctggaatttcggggagccgccgccggaacctgcaatcaggccgacacgcgggttattctgatagacttccggcgccagaccggcgtcggccactgcctgctccatagacagataagcatagatggaggcgtcgctcataaagcgcacgactttgcggtcaatgaggccagtggtatccagttttacgttgccccatacctggctacgcatgccggcgtccttcagctcctgagagaaagtgatccctgaacgtccttcacgcagagatgccaggacttcctgctggttattaccgatgctggaaacgatgcccaggccagtaatcactgcacgtttcattcaatacctctgtaattcgcactatttttaagtttcgattggcacaatagcgtacacttgtacgccgaacaagtccgatcagccatttagtacggaaatttgcgccatcaggcacacatcgttaagatcgcgataccgcccgtcagacgagtaacttacgtgaaacaatacgccatacaacccgccacactcgaatttaacgctgagggtacacctgtttcccgagattttgatgatgtctatttttctaatgacaatggactcgaagagacacgctacgtttttcttggcggcaatcgtcttgcggagcgatttcccgtacattcacatccattatttatagtcgcggaaagcggttttggcaccggactcaacttcctgacgctgtggcaggcgtttgacagctttcgttctgcgcacccacaggcgacgctgcaaaggttacatttcatcagttttgagaaattcccgttaacgcgcgacgatctggcgctggcgcaccaacactggccggagctcgcgccctgggcagagcagctgcaggcgcaatggccgctgccgctcccggggtgccaccgcctattgctggatcggggccgggtgacactggatttgtggtttggcgatattaatgaattgaccgaccaactggacgccacgctaaatcaaacagtcgacgcctggttcctcgacggttttgccccggcgaaaaatccggatatgtggacgccaaacctgtttaacgcgatggcgcggctggcgcggcccggcgcaacgctggcgacgtttacctcggcgggtttcgtccgtcggggattgcaggaagccggttttaccatgcaaaaacgcaaaggcttcgggcgtaaacgcgagatgctttgtggagtgatggaacaacacctcatgccgaccctttccgcgccctggttttaccgcagtggaagcgaaaaacgtgaaacggcgatcattggcggcggcattgccagcgcgctgttatcactggcgttactgcgtcgcggctggcaggtgacgctctattgcgcagatgatcagcccgcccagggcgcttccggtaatcgacagggcgcgctttatccgctccttagcaaacatgacgccgccattaatcgctttttcccgaccgcattcacctttgcccgtcgcctgtatgatgccctgcccgtctcttttgatcatgactggtgcggcgtaacgcagctcggatgggatgagaaaagccagcagaaaattgcccagatgctgtccctggcgctgcccgccggactggcctcggcgctcaatgccgaagaggcggaacaggcggttggcgtgacgacacgctgcggaggaattacctatccggcaggcggctggctgtgcccggaacaattaactcgcgcagtcatcgcactggcgaccgaacagggtttacaaacgcgctttcgccatacgctcacgtcgctcgttgcgcaggagtcgcgctggcaactgcgctttacgtcaggtgaaaccgccagccatgagaccgtcgttctggcgaacggccatcagattaaccgttttgatcagacccagccgctgccggtgtatgccgtcggggggcaggtcagtcatattcccaccacccccgctctctcggcgttgcgtcaggtgttatgctacgacggctatctgacgccgcaaaatccgcataatcagcagcactgtattggcgccagctatcaccggggtgacgaaagcaccgtctggcgcgaagaagatcagcgtcagaaccgacagcgtctgcttgactgttttccggatgcgaaatgggccacagaggttgacgtcagcggcaacagcgcccgttgcggcgtgcgttgcgccacccgcgaccatctgccgatggtgggcaatgtcccggattaccatgccacgctgacgcattacgccgatttagccgataataaaacgtcggcggcgcctgcgcctgtgtatccgggtttatttatgctcggcgcgctgggatcgcgcggtttgtgctcagcgccattatgcgcagaaattctggcggcgcagatgagtaacgagccgattccactggatgccggtacgctggcggcgttaaatccaaatcggttatgggtgagaaagttattgaagggaaaagcggtgaagtaatgggtcagtcaatagcggaaggcggcaagcgtcgccttccggcccacggcgttattgttttgccttgtcgaacaaattgtcccacatcgctttgactaacgcctgatcgcgcggcgacagttcgccggcgccgatcgctttttccagactttggctaacgttggcatagaccgcctcaacggagtggtcatcaccgctctccagctcggcaatggctaacgtcaggtggccacgcaggtatccactggcaaaaagctcatcgtcgctggcgtgctctaccatatcgtcaattaatgccagaatgcgtgattcaaactccgcgatcatcttctttcctcattgtaaacgtggcgctggctttaattaagcgcttccggccacgggaactgttccgccttaagttcgggcgtgtgatagtaattctgtagcgctttgatgaagcgggccggacgttcaggaatgccctgctccagatacgccattacctgcgcatgaacccggcgctgaaacgccacgcgatccggttcaatatcgccttccagattgtcgcaactgacgttaaagggataccccgccgccacgcaaaacaaccagtcgaaagcctgtggcttcacctcaacgtcttcgaattgactttgggtctgcgcgtcgcgtccgtccgggcagtaccagtaaccaaagtcaaccagttcgcggcgcgccttaccggcgatacaccagtgagaaatctcatgcagcgcgctggcgtaaaacccatgcgcaaagacgatacggtggtacggtacctgcgcgtcagcaggaagatagatcggttcgtcgtcgcctttaatcagacgggtattaaattcttcggcaaagcagccgttaaaaatctcaattaactgttcgtaatggtgcgtattgttcattaattcatccccaaccagtggaggatctcctgtccgtggctatcataaagtaacctggcgctcattaccgccgagacaataacgatcatcggtctgataagcttttggcctttgctcaacaccagacgcgaccccattcgcgcccctaaaaactgaccaaccagcatcacgaagcccgtcgcccagatcactttgccgccgatgataaataacagcaggccgccaacgttggaggtagcgttaagcactttggcatgtgccgtggatttcgccaggttatagccacataaggtgacaaacgccagagcgtaaaacgacccggcggcaggcccgaaaaagccgtcgtaaaacccgacgcatcccccggctatcagcgcgaacggtaatccatacaggcggcgctggcgatcttcctcgcccagcttcggcatcaataaaaaatagaggccgatgaaaatcaccaggatgggcaagatctggcgcaaaatatccgcctgcacgtgctgcaccagcagcgcgccgctcatcgagccaatgaacgtcatcagaatattgagcttttgctcggccaggtttaccactttacggcgaataaaatagagcgaagacgagagggagccgccgcacgcctgtaatttattggtcgccagcgcgtttgccggcgacatcccggcggccatcagcgcagggatagtgagcagccctccgcccccggcgatagaatcgataaatcctgccagtacggcgacaaaaaacagcaccaccagcagcagcggggagaccataaacagatcataaaaattgtccatcagagtacatgctcatccagtagcgcctggcaggaaggcggcagcggcggcggtgtcttcttctcaggctttgtggtgccaggttttggcggttcgaaccagctttgcagttcagcgccgcatccatcgcccggcgggggtaaaggttgatcttcgcactccaggctgtcggcagggcagcgtaaacgcacgtgcatatgcgcgcgatgctggaaccaggggcgtactttacgtagccagtcacgatcgtttccggcatcgaggcaaagctgttgtttaatagccggattgacgaaaatacgggtgacgtcattgtcttgtgctgccagtttgatcagactggcgatatccgacgaccagcgcgacggcacgacatgtttaccgtcgcgggacaccagatctaacgcctgcgggcgcaatagctgcgcctggctccagcgcgttttcggcaactgcaagaaaatatccacatcaagcccggtctgatgactggcgtgtccgccattaaagcggcctccggcaggcatccccatgtcgcctatcaggacggttccgagcccccgttgctgcgcctgatgactcaaccgctggataaacatgaccagatccgggtggccgaaataacggcgctgatcggtgcgcatcacctgataattatcggactgtaccggcaacgtgtcggcgccaatgatgcatccgttggcaaagctaccgatagactgggcggcgccggggacaggatgggttattttctgccacggcgtcgccgccaggctggcgctactgacaaaccatgccagcagcgcaatcgcggtttttttcatttcttaccagcgtggaatctctgtctttacatccgcattctgtgcccgatggcgcagcaggtgatccatcagcacgatcgccagcatggcttctgcgatcggcactgcgcgaatccccacacacggatcgtggcgccctttggtgatcatttcgacttcttcacctgcccggttgatcgtacgtcccggcacggtaatgctggaggtaggtttcagcgccatatgcgccacaatgtgttgcccgctactgatgccaccgaggatgccgccagcgtggttgctctgaaaaccctgcgccgtgatttcatcgcgattctggctgccgcgcagcgccaccacgttaaatccttcgccgatctccacgcctttcaccgcattaatgctcatcagcgcatgggcgatgtccgcatccagtcggtcaaataccggttcgccaagccctgccggcacgccgctcgccatcaccgtcactttcgcgccgatggagtcaccctcttttttcagcgcgcgcatcagttcgtccagcgcgtcaagtttgtccgcatcgggacaaaagaacggattaagctcaacctgacgccagtctttaatctccagcggaatgtcgcccatctgggtcaggcagccgcggatttcgatgccgaacttttccgccaggtatttcttggcgatcgcccctgccgctacgcgcatcgcggtttcacgcgcggaagaacgtccaccgccacggtaatcgcgcaggccgtatttctgctcataggtgtaatccgcgtgtcccggacgaaaaacatctttaatcgcgctgtagtcctgcgagcgctgatcggtgttttcaatcagtaggccaatgctggtgccggtcgtcacgccatcaaacacgccggagagaatttttacctggtccggttcgcggcgctgggtagtatagcgcgaggtgccggggcggcgtctgtcgagatcgtgttgcagatcggcctccgtcaacgggatgccgggcggcacgccatcgacgatacacccaagcgccagcccgtgtgattcgccgaaagtggttacgcgaaagagttgtccaattgtgtttcctgccatcacggctccgttatcgttgttgtcgtttgcgtgttttaatctttataaatattgaaatgttcacgggccgcgagcaactgcgctttggtcaacataaagacgccatcgccgccgttgtcaaactccagccaggtgaacggcacatccggatactgctccatcagatgtaccatgctgtttccgacttcacaaatcagaacgccgtcatcggacagataatccggcgcatttcccaggatacgacgggtcaatttgaggccgtcagtgccggacgccagccccagctcaggttcgtggcgatattcgttcggcagatcggacatatcctccgcatcgacataaggcgggttagtgacaatcagatcgtactgaactttcggcagatcgcggaacagatcggaacggattggcgtcacgtgatggataagaccgtgttcttcaatgttatgctcggcgacagccagcgcatccggcgaaatatcgaccgcatcaacctctgcgtccgggaaagcataagcacaggcgatggcgatgcagccgctgccggtacacatatccagaatatatttcggctgttggctaataaggccagcgaagtggttattaatcagctcgccaatcggtgaacgcggcaccagcacgcgctcatcgacataaaattcgtggccgcagaaccaggctttattggtcaggtaggcgaccgggatacgctcgttaatgcgacgaatcactcgctcgacaatgcggtgtttttcgctggacgtcagccgcgcggtccgcatatcttccggaatatccagcggcagataaagagacggcaacaccagttgtaccgcttcatcccacgggttatcggtaccgtgtccataccagatattcgccgcgctaaagcggcttaccgcccagcgcaacatgtcctgaatggtatgcagttcacttactgcttcatcgacgaaaattttatccacgtattcctccagggcatgctcgcattaaattcggcggctagtttgccacgaagacagggataaatcagcattgacgcggcgggagaatacgaaaaatccgttttgaccgttcggatatcctccgggtcgggtaaactaaggcaaaagatcagacgagacccacgaatgaaaaagaaaacatcgctcagcgaggaggaccaggcgctgttccgtcagctgatggtcggcacccgaaagattaaacaggatactatcgtccatcggccactgcgcaagaaaatcacggaagtccctacccgaaggttaattcaggaacaggcggacgccagccactatttttccgatgagttccagccgctgctcaatacggaagggccggtaaagtatgtccgtgaagatgtcagccatttcgagctaaaaaaaatgcgccgcggcgactattcgccggaactgtttctggatttacacggcttaacgcagcttcaggccaagcaggaactgggggcgctgattgccgcctgccgtcgggaacatattttttgcgcctgcgtcatgcatggacacggtaaacatattctgaaacagcaaacgccgttatggctggcgcagcatccgcatgtgatggcctttcatcaggcgccgaaagagtacggcggcgacgccgcgctgctggtgttgattgaagtggaagagtggcaaccgcccgaattaccctgatgcggaattgccggatggcggcgcaagcgcctgatccagcctacgaacagccagcgctgtcgtaggcctgataagcgaagcgccatcaggcagcaaagattaaatcgctttcgccattttcagattgcagggactcatttgccagttgaatgtccccttgccgctttcatcaagcgtaacgttggcaattgcggacgtcgtgaacatcggcggcgtttcgcccggacaaagctcagataccaggtatccgaccagaggtaagtgagaaatcaccagcaccgatccgatctcttcattggccagcgcctggaggtaggcgctgaccagaccgacatcgccacagggcgttagctccggcaggacatccacctgagccggcagattcatacaatcgccgaccacatctaacgtctgttcggcccgaagaaacggactcaccagaacacgttcgatatccactttttgacctttcagccagttcgccatcaggcgagactcgtcacacccacaaggggtcaagggacgaaccgaatcactggcggcatcgagggctgcgtcgccgtgacgcatgataaaaacttgcatattgcaccgcttttgttaaccagtttcaccaacacgcttaccacatgcccctattggctgcggcaaaaatgcggtggccggcattgtgccttatccattcactgaatgaaacgctgttttttacctcaatggcgtaagtatagtcaatccttgattattatttcgccactaaggaggcattcagtgcggattcatattctctttgacctcaatttccctggtcagtttccccattcgtccagaaatgctccctgcgctccgccatgcgcactaattgttcacaaggcgcgtaacgaggaccgtaaagtgcggccaggcgctgtaatgtcgccaccatttcacccggcccgagagcatccatatagcggaacgggccaccgagaaacggcggaaaaccgataccaaacacggcgccgatatcgccatcgcgcgcgctgcgaatcactttttcgtcgaaacagcgcgccgcttcgttaagcattaacatgacacagcgctctgccacctgctgcgcagacaatcgactctgcccttgcacgccaataagcttataaatagcagggtcaacctgttttttgcttttacgccctttttcgccataaagatagaaaccgcgaccattttttctacctttgcgatcgtcattcaaaattgaagcgacaacatttgcaggcgcgctaaaacgttctccatacgccgcctcaagcacaggaataattttagtgcccgtgtcgattcctacctcatccaaaagttggattggccccaccggaaaaccaaattttaccagggcggcgtcaatatgttcgacgcgttcgccttcagtcagcatccgaatcgcctcattgatatatggcgcaagaattcggttaacataaaacccggctttatcactgacgactatcggggttttaccctgttttttcgccagcttaacggtcgtggcgatggtctgcgcggaagtagacgcatgaggaataacctcaaccagcggcattttttcgaccgggctaaaaaagtgcaatccaatcacctgttccggtctggccgcattcgccgcaatatcgccaatcggcagggaagaagtattggaggcaaaaatggtgtgagcagcgcaattttgctccacttccgccaccatctgttgttttaacggcagatcttcaaacaccgcttcaatgaccagatcacgatgactgaaaccacggtaatcggtcgaacctgatatcaacgccaactgtttatcgcgttcgctggctttgatatggcggcggcgtacttttgtttcaagcagatcccagctgtacttcagagcatgattgatcccctgagtatttatatccttaattcgtactggcaagccgcctttacaggccgtaacccaggcgataccgccgcccattaacccgccgcctaagatgcccacgctgttcagcgggccgggcggcgcatcgctaccgggatcttttttcacctcggtactggcaaagaaaatagcgcgcagcgcctgcgattgaggcgtcatcgccagctcgccgaaagcgcgcgcttccgcgtcatagccgctactgctgccctgcgccagtccagtttcaatcacatcaatgatccgctccgtcgccggataattaccctgcgttttttgcgctgtctttttacgcaccaggcgaaataacagcgcgcgccccagcggccccgccaggatacgttcacggaccggtaatgtccgctgcgccaggcgttcttttttagccagctcgacagccgcttccagtaaaatagtttgcggcaccacatcatcaaccagcccggctttaagcgcctgtctggcgcgaagctgtttacctgtcaggatcatatccagcgcggtactgacccccaccagccgcggaagtcgctgcgttccgcccgatcccggtaaaagccctaactgtacctccggcagtccgagaacggttttaacgtcgtcggtacagatgcgccgatggcaggccagcgccatttcaaggccgccccccagacaggcgccgtgaatggcggcgataaccggaacaggcaacgcctggatctccgccatcagttgctgtccctgacgcgccagcgtttccgcttcctgcgcgttttggcagtgacctatcatgttgatatcagcgccagcaataaagttatctgctttggctgagataaaaacaacgccctgcaacgctttattttcccggatctgcttcaggatggcgcgtacctgcgtggcaaactccgctttcagggtgttcaccttttctccagggacatcaatagcgacaaccgcgacattatccagacgcacgttaagcataaaagctgatgtggtagtcattattccgcctccagaaccatcgccgcgccaagaccgccagccgcgcaggccgtgaccaggccaaaacctccgccccgacgccgtaattcatgcaacgtttgggttatcatccgcgcgcccgttgcggcaaaaggatgcccgtaggcgattgagccgccgagcacgttgaatttagcgtcatccacctcccctgtcgcctgcgcacaaccaagcacctcacgggcaaatcgttcgctgcccagcagttgtaagttcgccagagtctgagcggcaaacgcttcatgcatgtcaaaaagcgtcagatcggccatcgtcaacccggcccgctccagcgccagcggcgttgaccaggccggccccaatagcatgtcctgccagacatcaatagcggtaaaggcgtagctgcgcagataaccaagcgggcgcagccccagctctttagcgcgggattcggtcatcagaataacggcggcagcgccgtcggtcagcggtgtactgttggcggcggttacggagccatgttttcggtcaaaagcgggacgcagtttagcgtagtccgccagcgtggaggcgccgcgaatgttgttgtcttctgcaaaggggtttttatacggcggcacataggtcgtcatcacttcttccgccagtttgccctccgcccatgcctgcgcggcgcgctgatgtgaacgatgcgccagcgcgtcctgctgttcacgcgtaataccatacgttttcgccatctgttcggcggtatcgcccatgcgcagaccggtggaatactcagcaacggcgggaggaacgggcagcaggtcgcgtaagcgcagacgagaaaaaagcgtcagccgttggcgggtcgtccgggctttattgacatcaaccagtacccgcgccagggctttactcacgcctattggcagtaccgacgacgaatctgcgccgccagcgataccggcgcgtatcgtgccggccatcaggctttccgccacattcgctaccgcctgaaaactggtggcgcaggcgcggcttacgctataggcatcggtatgaacattcatccccgtacccagcacaatttcgcgcgcaatattgggggcttccggcatttgtactacctgaccaaaaaccagttgctcaatggcatcggctggaatttcactgcgcgccagcagctcgcctaccaccatcttgccgagatcaacagcgggaataccatgaaatgcagtggcctgacgagcgaagggggttcgtaacccactgacaatagcaatgcgatcgccctggcgggtgaccaacggtaaagcctgacgcatagtactcccctgtaaaaaaataaattagtggtctgacctgatcacagtcttaaccaattttttacatttagccaagcagagagaaaagaaagtgggagctaaggcacagtgaagggaagcgacaaaaaaagaaaacgcctccgccagatgatgacggaggcgtcgtgaatgaacggattaacgcaggccgagctggaagatcagcgtttctgcttcgcaggcgaaaacaaaatcaatatccagacgaacgccttcggattcctcggtaaaggttggcgtaatttggcaaggttcagactccacgctacgcgctttttcggttaacgccgccagcgtctcttcagcctctgcgcgggtagcgaatacgcggctgtatgacgcggtgcaatcggagttgtccatgatggttccaacgtccatacagcagcaaaccggggtttcatcagcactgcatttactcattgtagatttcctctgtatttgcacccagggtgccagataaacgatggggatattttacgctcccggcattcgcctctccagtcgttaatggtgggaaacgcgttaagtgaccgaaatcacacttaaaaatgatctaaaacaaaaatcgcgcgatcgggtgaccgttaagcccgccgattttgccagccagatctcgtttctaagatcacaattgaaaaaacttataaacatacttgcaacattctagctggtcagacctatactctcgccactggtctgatttctaagtcgtaccgcagaccctacacttcgcgctcctgttacagcatgtaacatagtttgtataaaaataatcaatgaggttatggtcatgagccagaaaaccctgtttacaaagtctgctctcgcagtcgcagtggcaatcatctccacccaggcctggtctgcaggctttcagttaaacgaattttcttcctctggccttggccgggcctattcgggtgaaggcgcaatcgcagatgatgcgggtaacgttagccgcaacccggcgttaattaccatgtttgaccgcccgacgttttcagcgggcgcggtttatattgatcctgatgttaatattagcgggacatcgccatctcgtcggacgttagatgcggataacatcgcgccgacggcctgggtgccgaacgtccattttgtcgccccgattaacgaccagtttggctggggggcttctattacctctaactatggtctggcgacagagtttaacgacacatacgccggcggctcggttggcggtacgaccgatcttgaaaccatgaacctgaatttaagcggcgcttatcgcttaaatgaggcctggagcttcggcctcggctttgatgcggtatacgcgcgtgcaaaaatcgaacgttttgcgggcgatttaggccagttggtcgcggcacagaatccggcgctggcgccggtcgcgggtcagattcccagcgacaccaagattgcccacctgaacggtaatcagtggggctttggctggaatgccggtatcctttatgaactggataaaaataaccgctacgcgctgacctaccgctcggaagtcaaaattgactttaaaggcaactacagtagcgatcttcccatcgctataaaccgatttaacctgcctatcccaacggcaaccggcggcgcaacgcagtcaggctacctgacgctgaatctgccggaaatgtgggaagtgtccggttataaccgtgtggcgccacagtgggccatccactatagcctggcctataccagctggagccagttccaggaattgaaggcaaaatcgaccgccggcgatacgctctttgagaagcatgaaggctttaaagacgcttatcgcattgcgttgggtaccacctattactacgatgacaactggacgttccgtaccggtatcgccttcgatgacagcccggtaccagcgcaaaaccgttctatctctattccggaccaggaccgtttctggctgagcgccggtacgacttacgcctttaacaaagatgcgtctgtcgacgttggcgtctcttatatgcatggtcagagcgtgaaaattaatgaaggcccttatcagtttgaatctgaagggaaagcctggctgttcggtactaactttaactacgcgttctaatctctttctgaaacggatcaaaaaggtgagcattgcgctcacctttttatttactgccgtttattccgagtcgatctctttgagttcgtcctgaatcgcctgcgcgttcgggttttcctgcggcttgagttttccgccattggcgataaagtcatgacgctggaagtacgcctcgcgcaccataatataaggatcggaagactggcgcagcaaaccatcggagtccagcaactgcgcgcgggtttctatcccttcgatagtccattttcctatggacattggccaggtcaaccacgagagcaccggatacaaggtatccgccatatccccgccatcttcacgcagcgtgaagctgccgtagaacggaagttgcatataaggcccataccccacgccataatggcccagcgtactgccaaagcgatgcggttcaacgcgctgcagcttaggattcgccattcccgcgacgtcaataaagccgcccatccctaataaggtattcaggaagaaacgggtgaaatgcaccataccctgataaggatcgccctgcaggaaatagttcaccatgatcgccggttcttcgaggttgccggtgaaattacttaaaccgttacgcgcaggctgtggaacataatcacgccaggcgaccgcgaccggccgaacaacatacgggtccagcacattaaagttgaagttgtacatggtgcggttaaacccttcaaatgggtctgaacgcccctgctgttctgtaccggaactcgcacacccgaccagcagtgtggttcccagcgccagcgccgacaggcgaagcttcatagatgtctccctgtgaattatggctatcgctgattgccatccatgacggaacgctaccgtatccgcctgtttaggtgtgagcgattttaacagcacgtcaaacgatgtctatatgcgcgatctcattgctttgagcatagcctggtaacgcaacaacgtgacggccctattctaacgaaacagataaaaacgagcgtgatcatttttattttttcggagaatgccccggcctgggtaaatgaaaaaccgctacgctttattaatatgtgttaatcagcagagatcatcatggatagccttaacgacgataaaattaaccggcacagcagtgacctggaagttgaaagcgaagaaaaacaaagcggtaaagagattgaagtggatgaagatcgtcttccttcccgcgccatggcgattcatgaacatattcgccaggatggtgaaaaagagatggaacgcgatgcgatggctttgctctggtcagctattgccgcaggactttctatgggggcatcactcctggcgaaagggatttttcacgtgcagcttgaaagcgttcccggcggctttttactggaaaatctcggctatacctttggttttatcattgtcatcatggcccgccagcaattatttactgaaaacaccgttaccgccgtattgccggtaatgcaaaatcccactctgagtaacgttggcctgctgatgcgcttatggggcgtagtcttattgggcaaccttattggcaccggggttgcggcgtgggcatttgaatatatgcctatatttgatgaagagacccgcgacgcctttgtcaaaattggtatggaggtcatgaaaaatagcccaacggagatgtttgccaacgcgattatctctggctggatcatcgccacaatggtatggatgtttcctgcagcaggcggggcaaaaattgtggtcattattttgatgacctggcttatcgcgctgggcgataccacccatattgtcgtcggttccgttgaaattttgtatttggttttcaacggcacgctgccctggagcgactttctctggcccttcgcccttcccacacttgccggaaatatctgcggcggcacctttattttcgcattaatgagccacgcgcagatccgcaacgatatgagcaataaacgtaaggaagaagcgaggctacgcggcgagcgcctggaacgggagcggaaaaaagcggaaaaacagcgctgagtggcgacggtttaaccagtcaggcggcgctacacttactccggcgaataaaaaacgctatactggcgccgcgttgtccccttagttaaatggatataacgagcccctcctaagggctagttgcaggttcgattcctgcaggggacaccattgatacccaggacattctcttcttgctgcataacctttcgagcggtttccctttcatgttgcttttattgcccctatgcaatatcaccggacatgccatacgttcagcaaaaagtcgtcatcggccggttatgaccgatgacatcccgatgtggtctagaagcgatactgcaaccccgcggtaaccgtatagttattattagctatacctgcggcatcgccaccaaaatacgccgtatcaccgctggttttatctatgatttgcgtaccgcccttaccttcttcatatttactgtaagcaaactcagcaaagatttttgcattactggtaatataatatccggcgtcaatagaagcgccataatatcgtgaattttccgttttttcacggaaggtaagtttgcgcatgtagtgttcgtcattatcatgcgcatttacccagtcgctgtatttaaacagtacattacactcaaagtcattaatacgataatcacccgccagcccgatatagggcatttcgaaacgctggctataacctatgccgcgcacgccatgaggaaaattaccaatatatcgaccattatcataaatataagacccgcctcttgccgtccagctaaaacgggtttcctgatagcccgctgttacgcccgccttgtagttatcgccctgcaataaccaacctttcacgttcaaatcgtattcattagcatagttgacgctggtgtccggatgaattgaacgatcggtccagcctggctgctcactgctcatccagtcatggtcaaccatatgacccgatcccgacgccaaagacgtccagccgcgggcgtccagcgtcatgaacgaatagggttcccatgataaatccccctgcaacgtggcgacattttttattttccaatccagttgactcagcttccgcccggtgtcggtatcataaaccagctccctggatttaccatttaacacacccacggaaagggatgtcgtgacgctatcaggagagacgtccggaataaataaggcagactccgcataaaccgactcagaaaatacggcgatcatcattactgcaatagcatgttttttcatttctcttgtcctcatattcagatgtaatctggagaggtgatgaagttttcatcttgtcaaatcgtcggacaagagtacatttattacgccagagaacttgacgcatttttaccttatattgaagttaagaaatagaatttgatgctcaggtgaataataagcaatctataatcatgatggaatgatttaccattacggtgatgcgacgttatctggctaacgacatcgttgctgatgttgtcagccagattgaaagtaactgtaatatcagaatttataatgctctttacttagaccatattttttcatgcgcagataaagttttttacggggaatttgcaggtactccgccacttcattaattcgtccctgatgaatatttaatgcttcggtaatgatttgtcgctcatactcttcaacgcgccggtcaagcggggtcggctcctgaagaagcaactgcgggttgaccgtttccgccagcggcagcacgccaacagcaaaaagctctgccgcattagccagttcgcgcacattgcttggccaggcgcgtcgcattattcctttcagtaattcccccgctatttccggcactggatgattgagtcgcaggcaggcttttcgaagataatggcgaaataacggctcgatatcatccggtcgctgagaaagagactggcaggcgatttgggtcatggcgaaacagtagtaaagctcggctgcaatctggttagctgccgcctgctccaccagcgaagcgctgccaacgcccaccaaacgaaaaggccgatgctccaggctttgtaaacgcgccagatggtgctgctgttcgcgtgtcagatattcgggatgactcaacaccagcgtgcctccttgcgcctggtcgatgaatgtctccaactgcccggcattctccggcgtaagttcatagcgtacaaacggccctttcgcgttacgccccagttgatggagataacgggcgccagtcatacgtccagtgccatgctcaccgtaaaaccatacggcaatgtccgtttccgccagttgttgtaaccgttgtcgaaactgattcatccactcgctgcgcccaatcagttcaacctgtaacgtctgctggcaatattgccgccgtgcaatgaccgaccggcgctggcgtagcgcgtcttcaattaatatcaacagcttgcccggatcgacgggtttttgcagaaaatcccaggcgccctttttcaccgcatcaaccgccatcggtacatcgccatgtccggtaatcaataagattggcagttgatcgtcatcctgatgaaacagcgtcatcagatcgataccggaacaccccggcatacacacatcgctcaaaacgatcccctcccaatccgcttttacccactctttggcctcgaaaggatgggtaaagccacgcacgcggtagcctgcctgctcaagcatttgggtataggcgtcaagtacatcaacgtcatcatcaatcagcaaaatagaacattcatcattcaacatcatcgacatccgttaccgagaattgcagcaccacgcaagcgttacgcgtcagcgtcgacgccagacgcaggtcgcccttcatttgcgccatcagcgacacgctaatcgacagcccaatacccaacccgacagctttactggtggtaaacggcttgagtaaagagggcaacagcgccacaggccagccagggccgttatctgcaatataaacctccagcgcctctccctgcgtctgccacgtcaccgcgatcaccgcatcatgcgaacaggcgtcaagcgcattcgccagcacattcaccagaacctgctgaatacgcacttcatcgccgctaacccatacggtgtcggttggcagtgaaagcgctccctgccgggattggtggcgcatggctaataactcccatgccgccacaaaggtttggcgcagatcaacgggatacaatggcgtttccagctccgcccgacgggtaaactgccgcagcgaacggataatggcgtcaatccggttaatgagcccttccgctttggtgagcgtatttctcgcctgtccgctctgaccttgttcaatcgcgcgtcccgccgtaaataaatacattgaaagcgcattcagcggctggttaatttcatgcgccagcgtggtcatggtctggccgactaccgccagtttcgccgtctgaatcaactcatcctgcatggcgcgcaggtcggcttctatctctttgcgctcggcgacctcttgttcaagctgcctgcgttgcatattgagctggcccagcgtatgacgtagcaaacgggctatccgtcctagctcatcgcgcccgtaaaccgggatagtcgagtcggttctccccagccctatctgtaccacagcctgattaagcgcggtaaaacgcttcaccagtcgggaacggataaaatagtggttgagtccccaggccagtagcaacgccaggagcgtcgccactaaaataagcccgccgctaacgcgaacaatctgttccaggcgttgattgaacgtctgcatttgctggtgactactacctaactgcgcctcaagcagcgtgcgaaagcgccctagcgtagcctctctggcgcggctggcgtccagtaaggctttttgcgccgcaacataatcgcgcatggtatcgggcatcttattttttaccatcccgatttccaatagttcgtcgatggtttgccgtagcgtgatcgtactgggccagtcatccagcgcacgaatattctcatccgccgttttttttaggttttccagatagcgaatatgggtctccaccagcatcccgtcattattgccggacttgagctcattcaatctgtcgcgcaggtcgtcaacaatctgattttcaattcgcgccagggtatatacctgctgctgctcgttctgcacctcgcgcgaacgttgcaaatactgcgctgcatcgccctgattcgcctcaatttgatcgagcagcgtcccctgctgccaggtaaaatcctgtaccagcgaatttagctccgtggtgaaatcatcatggagccagtcaatgcgagcggaaagctcgctaactttctcccgcaccaaaaacatgttgtagagggcattgtccagctccgccagcaaggtccggctatcctgtaaaatgacggccagttgccggcgctcagcaagctgaagcccctgactgagacgctcaatcttatccagatgctgaataatctgcgtacgtaactgcaaacgtaccgtcgtgttcggcgccagcaaaaattcattgagttgatccacggccagattcaggttcccctcaattaaaaaagcggagtggatgcgaggaaaatattcatcaagcgaatagcgaacctgcgaactttgctcatgccaggaataaaggctgaccatactgacaatcagcgtcagtaatgcgcccgttaaaaatgcgccccgtaaactgttgctgatactgagctgacgaagccgttgcaataatctccccttcatttcagctcttccagtttgtgaatcgccagccgctgattgttcagaaaccagatctgccactccatcattttttgttcggcaaagcttttattatcaaactgcgccagccaggtttcatcttcgctgcttgccgcatccaccgggacgctggtcaataaggctctgatttcaggtaaggggcgtttaagccgcgtttctgcgctgtgcaacgctcgccatgcatctttaagctgcgcgagacgaaaactgatcgcggtatcaaacatgcgttgtaccagttgctgacgcttcaggatcagacgatagttcaacggcggctgggccatcaaacgctgttgttgcgcggcgcgaggattatcggcgctaagcggtgcgacgggatacttaccggtattcgcgtcagccagtatcctttgccctttcggacttaataagtaatgaataaaagcacgcgcttcgtctgcatgacggctgtttttcaacaccgcgacgtaagtgggcgacaccgcagaatacgggaaataggtaaaagcaagattaggatcgttaagtagcaaattagcatagttatcaatgaccggcccggcaacgccaagcccgcttttgattttatccgctacgccgaaactgcgagaggaaatcgtgaccagattacccgagattgccagcagcgttgcccatcctgccgtccagcctttttgctgcaacagcgactccaccatcaaatgattcgtgtctgagcgtgacggactgctcattaatagagcgccctggtaactgggcaggcccatatcctgccagtcggcaggcggcggaagatggcgcgcagcgagcgctgaacggttgatcaatagcccaaatccggataccgctaccgccactgaagttgagcggatagaacgcggcaccagcttctggctggcggcaggcgcgctatccaatagcgccagcttttggtgctcctgaaggtgttgcaacagcatgggggatgacgtcaggatcagatcgacattttccgcattcgccgtatcaagtaattgctctaaagaaccgctggtacggttgagcgtacgaatcatgacggaacccggctccgtctgccagcgctggataatccaggcggtcgcgctgggtgaaaaggtcgttgccatcaccagctcgcggctgtacgcctggcaagaaccgaacattgccgccagccatagcgtaaaagcgcccactctggcgaaacgactacagcatgagaaaagtcgatttgtgatcccgttcataaatatcgatatcacataaagaaaatattgagacaaaacttacccttttatttctgttggcatccagaacaacgttatttgaataataacgggtccgtcgcccgaaaacatcaataaagcgtatcagatcactggcagcaaatttgttaatatccgcacatgctaacgataaaacggccatgccaataattaaagtttcaccacacccttcaggatgggtcaaaaataacctttaaattcacccaattgagtcaattttgacacatttcttcgacttgaattttattgtcactcctttcactctaccgacaaaacctcctgatgttcatctcactataaaatacaggtgactccatgttaacaatattaaaaacagggcaatcggcgcataaagtcccaccggaaaaagtccaggccacatatggtcgatatcgtatacaggcattgttaagtgtatttctgggatatctcgcttactatatagtcagaaacaacttcacattatcgacgccttatttaaaagagcaattggatctcagcgctacgcaaatcggcctgctgagtagctgtatgcttattgcttacggaatcagtaaaggcgtaatgagcagtctggcggataaagccagcccaaaagtcttcatggcgtgcggtctggtactctgcgcgattgttaacgttgggctgggattcagtagcgcattctggatatttgccgctctggtggtcttcaatggcctttttcagggcatgggcgtcggcccctcgtttattactattgcaaactggttccctcgtcgggagcgcggacgcgtaggcgccttctggaatatctcgcataacgttggcggcgggatcgtcgcgcctatcgtcggtgcggcttttgcgatattgggcagcgaacactggcaaagcgccagttatatcgttccggcctgcgtcgccgtcatttttgccttaattgttctggtcttgggaaaaggttcgccgcgcaaagaaggtcttccctccctggaacagatgatgccggaagaaaaagtcgtactgaaaacgaagaatacggcaaaagcgccggaaaatatgagcgcatggcaaatcttctgtacttatgtgctgcgcaataaaaatgcctggtatatttcgctggtggatgtcttcgtctatatggtgcggtttggcatgattagctggttgcctatctatctgttgacagtaaaacacttttcaaaagaacagatgagcgtcgcgtttctctttttcgagtgggcggcgattccctccacgctactggcaggctggctgtcagataaactgtttaagggccgcagaatgccgttagccatgatttgcatggcgctgatttttgtctgtctgatcggatactggaaaagtgaatctttgctgatggtaacgattttcgccgccattgtaggttgtctgatttacgtcccgcagttcctcgcgtccgtacagacaatggaaatagtccccagctttgccgtaggttccgccgtcggtttacgtgggttcatgagctatattttcggcgcctcgttgggcaccagcctgtttggtgtaatggtggataaacttggctggtacggcggattttatcttctgatgggcggcatcgtgtgctgcattctattctgttacctctcccatcgcggcgcgctggaactggaacgccagcgccagaatgcgttacataatcaggactcactgcagcttgcggacgcgcaataaacgattagccttcctggggaacagaagcgccgacattgtcggcgctatctattcactggcatcgtatatacccaaaataattcgagttgcttaaaggcggcaagggagtgagtccccaggagcatagataacgatgtgactggggtgagcgacaaatctgccgggagcagatttgaacgtcacgtgcgacggcccgtcagagcgaggcccatcgatgggccgagtaatccgtagccaacacatcagcaacttgaagtatgaagggtatgtactgactaacgcttaccgtatcccaccataaagcgaataattaacccacatgccggtgcgagaaaaagcaataatccgctaacgatgtcatcgccatcctgcaaccatacattgagtaaataaatcagcgcggcaaggataaccattcccgtaaaagaagaaaccgcagaaaaagcccccatcacctgaccgatatagccactcacggcaagtatacttattgcaagaaatgtccataaatagatcatctataatacctcctgtctatggcaaggcttccatatagccttacggtccctctcacttctcctttaagataaaccttatcagcccgtcatttccataacatttatctcacattttatttttttaatcatttttcaatgaccttcgtctgaaataaaattatcactgtaaaaacaatgcattaaaaataatgattagcttatttttgctacgggagaaatatttacgcttcttgataaagaatttctgggcgcgagtaaataactggtggtacattagcctgcctggcgttcatgccctcgtggtttagtactgacttagttttacactccttacgggaaccattgtcgtacatgatggcctaactatacgtaaatcattcaagttaccctgatgagcttactcaagtaagtgcttcggataagcgaacgcaacttgaaggatgatgcgtatttcagagtgtaccgctgcggataatgactcttctgcgatacattattttcgtatctacagaaggtattttatgtttcctcaaagcaaattttcacgcgcgtttttgcacccgcgctactggctgacgtggtttggcgttggcatcctctggttactggtgcagcttccctacccggttttgcgttttctgggcacccgcaccggtaaactggcgcgccccttcctgaagcgacgtgagtcaatcgcccagaaaaatattgaactctgttttccgaccctctcccgggaagaaagggaaaaactgatcgccgagaatttccactctcttggcatggcgctgcttgaaacgggcatggcctggttctggcctgatagccgggttcgcaaatggtttgatgtggacgggctggacaaccttacccgtgcgcaggcgcaaaatcgcggcgtaatggtcgttggcgtgcattttatgtcgctggaattgggaggccgggtaatgggtctctgccagccgatgatggcgacctatcgtccgcataacaatccgctcatggagtgggtgcagacgcgcggtcgtatgcgctcaaataaagcgatgatcggcagaaacaatctgcgcggcattgtgggcgcgctaaaaaaaggggaagccgtttggtttgctcccgaccaggactacggccctaaaggcagctcctttgcgccatttttcgcggttgaaaacgtcgccaccaccaacggcacctatgtactgtccaggctgtctggcgccgccatgttgaccgttacaatggtaaggaaatccgataactcgggttatcgtctgtatattacccctgaaatggaaggttacccggcagatgaaaatcaagccgctgcctatatgaataaaattattgagaaagagatcatgcgcgccccggagcaatatctctggatccatcgccgtttcaagactcgcccgttgggggaagcgtcactctacatctgaaaaaggccgcaaggccttttattttggcatttcgcattgtcataatattcatatcgtaaattactcattcctgcttttagcgataagtctcctgtttacaggcgattttttactgtgtcggcggcgtcgctcaatagcgattcatcactgtcagaaattaaactgtcgccgattcccgacacttgtaagttactaaaagtaaataagaaaatgcctcttgtttcacctcatttttaggcgtacattagcgccgtctggagcgatgacgcgcagaattctgaggtgatgcaggcggtcgaaacacgaataattctcaatttcgtattatccggcatcaactctctataatcaggtaagtgtaagttcatttaggcgtacgacaggtacgcggagagatgaaacgtgaaatatttctttatgggcatttcatttatggtcatcgtttgggccggtactttcgccctgatgatttaaaagtacaatgcaaagaaaaacaggagccatggggctcctgtttgcttttctactccgtgctcgcttcaacgggttttggatgtgacggcagcacgccatcggcgcggaacatcgctttaatccctctgacggcctggcgaatgcggtcgcgattctctattaatgcaaagcgtacatgggtgtcgccataatcaccaaagcctatccctggagaaacgcaaaccttcgcctcattcagcagcttcttggcaaactcaagcgatcccatcgccgcatattgctccgggattttcgcccagacgtacattgaggctttcggcatttcaaccatccagcccgcctcatgcagccccttcaccagcacatcgcgacgacgtttatactgctcggcgatatcgcgcacgcactgctgatcgccttccagagcggcgatagccgccacctgaagcggggtaaaggtgccataatcgtgataacttttaatgcgcgccagcgcgctgaccagggttttattgcccaccataaacccaatacgccagcccgccatattatagcttttcgacaatgtgaaaaattcgaccgccacgtcgcgtgcgccgggcacctgcataatggatggcgctttccagccgtcgtacacgatatcggcatacgccagatcgtgcactaccagcacatcataacgtttagccagagcgaccactttttcaaaaaattccagttcgacgcactgggccgtagggttagatggaaaacccaaaatcatcattttcggtttcggataactttcgcgaatagcgcgctccagctcgttgaagaaatccaccccctcgaccaatggaaccgaacgcacctgcgccccggcgataacggcgccatagatatgaatcgggtaactggggttcggcaccagaaccgtatcgccatgatccagcgtcgccagcattaaatgcgccagtccctctttggaaccgatggtcacaatcgcttcggtttccggatcgatatcgacatcataacgttcctgataccagtgagaaatcgcgcggcgtaaacgcggtatgccgcgagacgtggaataaccgtgcgtatccggacgctgcgcgacggtgcaaagtttttcaacaatgtggggaggggttgcgccatcaggattacccatactgaaatcaataatatcttcaccgcgccgacgcgcagccattttgagttcagcggtgatgttaaaaacatagggcggaaggcgatcgatacgcgtaaagcgacgttcagggcggaagtcagccataatatcctcagattaacgttagcgcccggaccgtccgagcgacgctgccacgatggtggctcctttagaaaatagcctgaaaattttcttcctgtcgagaggctaatgaaaatatttttagcgacaaaaaagaggaacaagcgtaaaaacttactttttaagcgtgtcagttatagcatcaaacaaatcatattattaacaaattgatatcattgaatttacgtaacgtgacgcagccgacgataatttcctgtcaataaaccttatctcaaataatccccttttgattttgtggtttttcctctttaatcaaaagccttactaacgataatggtattcgatcatgtcatattgcggtgtttttcagggatatttccccgaaaatgaggatcctttccggcaagctgccgcgatgaaaccgtaaataaggcagcgaaccggatacgtatagtaaaataaatccctgttttcgcctgactaaccgccatgacgtgatgactcaacgcgctggtgtttgacctttcgctcagcaagagtaaagtgaaataattcagacagttgaagcattcatgcacaggaaaggcaatgaaaaaaaccgcgtgaggcacgcggtttgagactgacaagagaatgtttaattgcctgataacgctgcgcttatcaggcctacagatgacacacttttgtaggccggataaggcgtttatgccaccatctggcttatagaatatgacctaatgtctggcgcagatgcgcgccggaacctaacaagccaggattatcatggacaatcagatagaccggaataccgtgtacataatctttaaagcggcctttatcttcaaagccaccacggaagccggacgctttaaaaaattccaggaagcgcgggacaataccgccagcgatataaacgccgccaaatgtccccatggttaacgccagatcgccgccaaatcgccccatgatgacgcaaaagagcgacaacgcgcggcgacaatcgatacagctatccgccagggcgcgttcggtaatatctttcgggcgcagattttccggcagacggttgtcggacttaacaatcgcccggtaaagattcaccagccccgggccagacagcacgcgctcggcggaaacgtggccaatttcggcgcgcaatatttccagaatcatagcttcttcttcgctattaggcgcaaaatcgacatgcccgccttcgcccggaaggctaatccaacgcttatccacatgcaccagatgcgccacgcccaagccggttcccgcgccatacaccgcaataggtttgccgtctaccggttcgccgccgccgaactgaattaaatgctcttttttcagcatcgggatcgccatcgacacggcggtgaaatcgttgatgatttccagatggctaaagccgagattttttttcatttccgcaatagaaaaagcccaggtatggttagtcatcgctacccagtcaccggtaatcgggcaggctatggcgatacaaccatcttccacgctgacgctatgctcatcgagataaacgcgcaccacggcctcaagactgggataatccaggccggaatacgttttggcctgcgagatttctccactggcgatatcacacagggcaagacgcgcattcgtgccgcctacatctcctactaaagcatactttgtcattcttctactgctccgctaaagtcaaaataagtctttgtcacactgtaaattcatgggggcataacaacaacggccatcaggctgactgcctataaatatagatcttcatcacagaattactttcttgtttcagcaccaattgcagcaatgccgtcgggcaggctgtgcaaaataggtatacgaccccgtgtaaggaagagattatgttccacccgcgtgcccgaacgatgctgctgctgtcgctccccgcgctgattattggcgtagcgtcaagcctggttttaatcgctgcgatgaaagtcgcgtcggtttttcagcaatttctttggcaacgactgcccaccagcatcggcatcgcttatgattcgccgttctggatagtgggtatgctcacgctaaccgggatcgtggtgggtttgattatccgttacagtcccggacacgctggccccgatccggccatcgaaccgttaatcagtatgccggtctcgccatctgcgctacccgggctgcttctcgccttaatcatcggccttgctggtggggtaagtttggggccagagcatccgataatgacaataaatatcgcgctggcggcggctttcggctcccgcctgtttccgcgtatcacggcgttagactggacgattctggcctcagcgggcaccatcggcgcgctgttcggcacgcccgtcgccgcagcgctgattttttcgcaaacacttagcggctctaacgatattcccatgtgggatcgcctgtttgcgccgttaatggcggcagcggcggggtcactcaccaccagtctgttctttcatccgcatttttcgttacccatcgcccattacacgcagatgcggctggtggacattgccagcggagcgatcgtcgcggcgatcgccattgccgccgggatggtcgccgtctggtgccttccgcgtctgcatgagttgctgcaccgcctgaaaaatccggtcctgattctcggcattggcggttttatactgggtattctgggcgtcattggcgggccgcttaccctgtttaaaggcctggacgaaatgcaacaaatggcgtttagccagacgctgggcgcgggagattattttaccttagccgtcgtcaaactcgccgcgctggtcatcgcggcggcgagcggctttcgcggcgggcgcatttttccggctgtgtttatcggcgcggcgctggggctcatgctccatgcccatgttgaggccgtacccgcggcgattaccgtctcctgcgcgattcttggcttagtgctggtagtgacgcgcgacggctggctcagtctgtttatggcggcagtcgtcgtaccggataccaatctgctgccgctgctctgcattgtgatgctccccgcctggctattgctggcgggaaaaccgttgctggccgccaaccgtcacgaaccctaatccggcgcagcgggggccattatcccccgttgcgggcttccagcgcccgggtcacggtacgcagtaattccggcagatcggcttttggcaacatcacttcaataaatgacagacgttgtgggcgcgccaaccgttcgaggacctctgccagttggatagcctgcgtcacccgccagcactccgcctgttgcgccgcgtttagcgccggtggtatctgcgtccagttccagctcgcgatgtcgttataccgctgggccgcgccgtgaatggcgcgctctacggtatagccgtcattgttgagcagcaggatgaccggcgcctgcccgtcgcgtaacatcgagcccatctcctgaatcgtgagctgcgccgcgccatcgccgataatcagaatcacccgccgatcgggacaggcggtttgcgcgccaaacgcggcgggcaaggaatagccgatagacccccacagcggctgtaacacaacttccgcgccgtcaggaagcgacagcgcggcagcgccaaaagctgctgtcccctggtcgacaaggataatatctccgggtttgagatactgctgtaaggtttgccagaagctttcctgggtcagttctcctttatcaatccgcactggctgtccggcggaacgcgtcggcggcggcgcaaaagcgcattccaggcacagttcgcgcagcgtagacaccgcctgcgccatcgggaggttgaaccaggtttcgccgatgcgcgacgcgtaaggctgaatctccagcgtgcgttccgccggtaattgttgggtaaatccggccgtaagggtatcgacaaaacgggtgccgacgcagataaccctatcggcgtcctctatggcctgacgcacttctttgctgctggcgccagcgctataggtgccaacgaagttcgggtgctgttcatcaaaaagccccttccccatcagtagtgtcgcatgagcgatgggcgtttccgccatccagcgctgcaacagtggtcgtaaaccaaaacgcccggcaagaaagtcggccaatagcgcaatgcgccgactgttcatcaggcactgacgggcgtgataacgaaaggccgtctccacgccgctttgcgcttcatgcacgggcaacgccagcgcctgcgtaggtgggatggccgtttttttcgccacatcggcgggcaacatgatgtatcctggcctgcgtgcggcaagcatttcacccaacacgcggtcaatctcgaaacaggcgttctgttcatctaatattgcgctggcagcggatatcgcctgactcatgcgataaaaatgacgaaaatcgccgtcaccgagggtatggtgcatcaattcgccacgctgctgcgcagcgctacagggcgcgccgacgatatgcaagaccgggacatattccgcgtaactgcccgcgataccgttaatagcgctaagttctcccacgccaaaggtggtgagtagcgctccagcgcccgacatgcgcgcatagccgtccgcggcataagcggcgttcagctcattggcgcatcccacccaacgcagggtcgggtggtcaatcacatggtcaagaaactgcaagttataatcgcccggtacgccaaaaagatggccaatgccgcatcctgccagtctgtccagcaaatagtcggccacggtataggggttttgcatgacagctttccttctgacgttgatattatgttgagtattaaggaatgccgatggctgtccagcacggtggggatgaaagcctggaaaacaatgtttacagcggcaaacagtaaaagccggataccgcctggcgagtgtaaccgtatacactatttattcacgccacagggggaaaggtcatgatttatcagcccgatgagaatcgttatcacacaatggagtatcgtcgctgcggacgcagcggcgtcaaacttcccgctatttcgctggggttatggcacaacttcggcgatacgacacgggtagaaaatagccgggcgctgctgcaacgcgcgttcgatctgggcattacccactttgatctcgccaataattatgggccgccgccgggctccgcagaatgcaattttggccgcattctgcaggaagattttttaccgtggcgtgatgaattgatcatctccaccaaagcgggctacaccatgtgggatggcccttatggcgactgggggtcacggaaataccttatcgccagcctcgatcaaagcctgaaacgtatggggctggagtatgtcgatatcttttatcaccatcgtcccgatcccgaaacgccgcttaaagagacgatgaaagcgttagatcaccttgtgcgccatggcaaagcgttgtacgtggggatctctaactatcctgccgatctggccagacaagctatcgatattctggaggatctcggcacgccttgcctgattcatcagcctaaatattcgctttttgagcgttgggtagaggacgggctgctggcgctgttgcaggaaaaaggcgtcggtagtattgccttctcgccgctggcgggcgggcagctcactgaccgttatttgaatggtattccggaagattcccgcgcggcgagcggaagccgtttccttaaaccagaacagattaccgccgacaaactggaaaaagttcgccggttgaatgaactggctgcgcgacggggtcaaaaattgtctcagatggcgctcgcctgggtgctgcgtaacgataacgttacctcggtactgattggcgccagcaaaccgtcgcaaatcgaagacgccgtgggaatgctggccaatcgccgtttttcagcggcggaatgtgcagaaattgacgctattctggagggccggttttagcaaaaaatgctctccttcatgatttaagagttaaggcgatgaaacaaatctttactgctttgtaatattgcattaacaggccggcgacggctcgatcgtgaaggagagaaagtatgttcaggtcactgattctggcggcagccttgctggcttttacaccgcttgccgcgaatgcgggcgaaatcaccctgttgccctcaataaaattacagattggcgatcgcgatgattacggtaactactgggacggtggtcgctggcgcgaccgggattactggcacaaccattatgaatggcgtaaaaatcgctggtggcgccatgacaacggctatcatcgcggctgggataagcgtaaagcgtatgaacgcggttatcgggaaggctggcgcgatcgcgacgatcatcgcgggcgaggccggggtcacaaacatcatcactaagcctcctgctgaataacagcccgatgacgcccacgcatcgggcctgctatctttctgtctttatgacaaccccatcaccgttccaaccagcaaccagatattcagggcgacgaccagcacgacaattatccagccaacctgttttacccgccgcgtgttcaccagctcgcccattagcgtagcgttactggtgaaaatcaggagcggcaccagcgccagcgcaataccaaaactcagcagcacctggctcatcaccagaattcgggtagggtccagccccatcaaaatcacaataaatgagggcagcatggtaatggtgcgccgtacccacagcggaatgtgaaaacggacaaacccttgcatcaccacctgccccgccagagtccctaccacagtggaggaaagccctgcagctaccagactaagaccaaacaccgttgccgccgcatggcttagtaacggttccagcgtcaggtatgcctgatcgaggtcggcgatgccggtgtggccgctaaaatgaaacgccgccgcggcggtcgccatcattgccagattgacaaaaccggcaatcgtcatagcaatagcgacatcccatttcgttgctgagtaccgttgttgccgtgttccgccgtgcagatgctgcgttaatgacgagtgcagataaatcacgtgcggcataatcgtcgcgccaagcacgccggcggctaagaatacggcttccgggttcggtagcgccgggataaccattcctttgccgagctgcgccatatcaggctgagagaaaaacagctccacaatgtaagcggcggcgacaaaaagcagtaaaccgccgatgactttttcaagcggtttttgaccgcggcgctgtaacattaaaatcagaaacgtcgcgataccggtcaataccgcgccctgtaataaagagacgcccaggatcagcttaaaacctattgccgcgccgataaattcagctaaatcggtggccatcgcgatgatttccgcctgtacccagtaaaaccagactaccggacgcggataatggtcgcgaatttgctccgccaggttcttgccggtggcgatcccgagttttgccgagaggatttgaatcagcatcgccatcaggttcgcccagaccaccacccagagtagctgatagccaaagctggcgccggcctgaatattggtcgcgaagttaccaggatcgatataaccaatcgcggcaatgaacgcaggtcccattaatgcgagccttagcttgcgcgccgcccgtccgctgctattctctacgcgattgtcagtcatcttttgcctcaaaaacatagcctttgctatgtttcatgctatgtttattgataatgattatcaagtgcatttcaatgggtacgggtgattactttgatagtgtgaaacgatagaccgatacgatgacgacctgtatcagaacagtttggcttaacattacaagattagcacactgatataacttttcattttcatattcagtacagtaaaagtgtattacagatcactaattttgaatctcgtcacaggtccttattatagtgtgtgttggatctcgttttctttacggctgttgcatagaatgtgcacgaaaattaaacctgcctcatatttggagcaaatatggaccgcgtccttcattttgtcctggcgcttgccgttgttgcggtactcgcactgctggttagcagcgaccgtaaaaaaattcgcattcgttacgtcattcagttacttgttatcgaagtattactggcctggttcttcctgaactcggatgttggccttggcttcgtaaaaggtttctccgagatgtttgaaaaactgctcggatttgccaacgaagggacaaacttcgtctttggcagtatgaacgatcaaggtttggcgttcttcttcctgaaagtattgtgcccgatcgtctttatttccgcgttgatcggtattcttcagcatatccgcgttctgccagtggtcatccgcgctattggttttctgttgtccaaagtaaacggtatgggcaaactggagtcttttaacgccgtcagctcgctgatcctcggccagtctgagaactttatcgcttataaagatatcctcggcaaaatgtcccgtaaccgcatgtacaccatggcggcgaccgcaatgtctaccgtttccatgtctatcgtgggcgcgtatatgaccatgctggaccctaaatatgtggtcgcagcgctggttctgaacatgttcagcacctttatcgttctgtcgctgatcaacccctatgtcgttgatgccagcgaagaaaatattcagatgtcgaacctgcatgaaggccaaagtttcttcgaaatgctgggcgagtacattctggcaggttttaaagtggcgattatcgtcgcggcgatgctgatcggcttcatcgcgctgatcgcggcgctgaacgcgctgttcgcaacggttaccggttggttcggctacagcatctccttccagggcattctgggttacatcttctacccggtcgcatgggtaatgggcgtaccgtccagtgaagcgctgcaggtaggaagtatcatggcgaccaaactggtttccaacgaattcgtggcgatgatggatctgcagaaaatcgcctctaccctctctccacgcgctgaaggcattatctccgtcttcctggtgtccttcgcgaacttctcttccatcggtattattgcgggcgcgattaaaggcctgaacgaagagcaaggcaacgtggtttcccgttttggtctgaaactggtttacggttctacgctggtgagcgtactgtccgcctctatcgcggcgctggtactgtaagtctgggtttaatgcagaaaccggggagctatccccggtttttttatgccgcttatttgcctaacgggcgcgggcggccaatcagatatccctgcaaactgtgtacgccaagctgcaatagcagatcgcgctgcgcaggcgtttcaacaaactcagccacgacgctcaacgatttcgctttcgctaaatcagtgatggatttcacaatcatcgcatccagggagtccgtcagaatatcttttacaaaacaaccgtcgattttaatgatgtccgccttgaggcgttttagccgttcatagtttgcataaccggtgccgaaatcatcaatggcgatttttaggccgaacttacgcagttgattgatattgtgcatactgatttcggaatgagagaaggcctgttcttcagtaatttcgatgatgaccgaagcaggcgggacgccatagcgtttaaaaagctgcataatgcgcgacgccgtctctttttgcagcagcgtcaacggcatcaaattaaccgaaaaacgtgccccctgttccgctgaaggatgcgcggacagccattgcaggagcgcttccatcacctgcatatcaaaccgtatgctcaggttaaactgggcgataagcggaatgaactgattcggcatcatgataccgtcgtcgcaccgaagccgcgtcagaatctcgtcatacccttttccctgcgcgtcgcgaatgggttgcgcatacaaaaccagcgcgccgcgctccagcgcctgacggattttctgcaaccgcagcacccgttccgtcgtctgcccggaagcggcttcaatactctgggtcagtgcaagcacccgacggtgcgaacaggattgctccgccagccagcttaattgccccaacagcggttgcaaggtttcctggcgaccatcgaatgttccccacgatgcgccgtattccatgtccagaccggtattgttccagtaaattttgcggttattaagcacgttgagcatatattgcaggcgggcttccgtctccggtcctgtcagcaccagcaataattcactgcccggcagatggaaaattttctccttttccagcagcagcggctgcaacatgcgaaacacctcgcgttcgcaatgcacgcgcatctgcataccgtaatgacggctcagaaattccaggttttccatgcgtaaataacacacgctttgcccggcatcctgtaaaagaaactgctccagcgcacgcaggttaggcagttgcgtcaacggatcggtcaatgcctgcgagtgccattgtcgattcaaccattcgctacgctgattaatccgcgccatgtacaacaaacaaatactaaaagaaatgagaactgaaaggataaatgccagcgaatattctgaacccacgccctgcagaaaattgcggttatagctaagcaggaatagcgcagtgagagcccaactaaaattcaacagcggatagctgattttccccacgccgatggtaaatccaatgaacagaactggcaccagatagccagcaatatactttgtctcgaaaggcgtacacagcaccgctaatagcgtcgccagagtggcaaaccagagaagcgtaaacaggcgtttttctttggcgagataaggagcgacatccctccgccagaaaatacgcatatagtgcgggctgactatcatccgcagcggataatagaaaaagagggtaaaaataagcgcggcagaaatcagactcaataaatcgacaatcgagaaaatagcggtgccggtgccaaagaaggtagagatggtcaccgggaaagccaggtagtgccccgccagatgcatactgatttttataccaaacggcgtcattaaccctaaccagaaaacgcgtagccagatgccttggttgggtattccgtagcgccagcgcgcgcccagctgccagcgtacgatagcgcaaaccagcagcacgggaaacgtttggcaaaatagcagcaccatcgcctgtggcagaggtaaatgaaaattccattcattagtcaacatcattccgcctaccatcggcgcgacgccacggcggccaaataaaaacagcacggaaaacatgacgcagagcggtagccaggccagaaagatatagctggaatcaattgtggcgcggggagaaatgagacgagatagcagaatagccggaacggtcaggcagaaggccagtaagaatatttttatattttttaatacgttacacttatccggcattgctttaatgctcacatcattatataaggcgcatgaataataagtatattcgcattatgaagcaatctaacaaaagctcatattgaccgcaaaagcagcggcaaacaaacgcacctgaagagcagatcagaggccataaattttgtgacaaaaagcaaaaacccccgcttttcagcgagggtttgaatgttggtggagctaagcgggatcgaaccgctgacctcttgcatgccatgcaagcgctctcccagctgagctatagccccatagtgcttttacgtatacgccaaatttatcgggagtaaatttggtggagctaagcgggatcgaaccgctgacctcttgcatgccatgcaagcgctctcccagctgagctatagccccactacgtaaagcttgtcgagttgacgggcggcatcatatgaattccctcggcatgtgtcaacggcaaaatgaacttgccgaattcaatcgctgaaaaagcattcaaataaaggacattgcggcacaactcgcattcagtagttaaacacgtcacggtttcgactaaaatggtgctataaaatgaaccactaattaaccccacgactattcagggaatcgttatgttcaaggaacggatgacgccagaagaactcgctaatctcaccggttacagccgacaaaccatcaataaatgggtacggaaagaaggctgggcaacatcgcccaaacctggcgtccagggcggtaaagcccgtctggttcatgtaaacgaacaggttcgtgaatatatccgcagcgctgaacgttcagttgaccatcacgcagacacattcacgcctgccagcaacgcatcgcttgaagcgctgctcatgacgctcgccaaagagatgacctcatccgagcagaaacagtttacctctctcctcgtgcgtgaagggattaccggtttgttacaacgcttagggatacgcgatagcaaataatatgaaaagattacgcagtaaaatgaccactgaagagctggctgaatgcctcggcgtggccagacaaaccgtcaatcgctggatcagagaacaacactggaaaaccgaaaaatttcccggcgtcaaaggcggacgcgcaagactcatccatattgatgccagcgtgcgggagtttattctcaatattccggcttttcgcaaactgcctgcgttttatcaggcggaagaggctttcgcagaatatgcgaacgcggcgcacagtcatgcttatcgacaaattattgatgccgttgaaaatatgtctgctcaggaacaggaaaaactggcgctgtttttatcgcgggaaggtattcgcggatttctgacgcgtttaggtatcaatgaggcggactaacaaataataaacggcaggcgtctgccctgccgtttattctgtttcagctggcgttactgctgactttcacgctcggcgataaagcccagcgctttgttgatgcgctcaatgctgcgggttttaccaatcgcatgtacggtgacatccagcgcaggcgactgcccggcaccggtcacagccacacgcagcggcatccccactttacccatccccacttccagctcatccgccgtggcctgaatcgcgtggtggacgttttctgctgaccagtccgtaatcgccgacagcttgtcgcgcaccacttccagcggctgacgcgccaccgggcggaggtgttttttcgccgcatcggcgtcaaactcgctgaagtcttcatagaagtagcggcagctctgcgccatctctttcagagttttgcagcgctcgcccagcaacttcaccagttcagcaagctgcgggccgttacgggtgtcgatattttcctgctcgatatgccactgcaaatgcgtcgccacatattccggcgccagcgtattgatatagtggtggttcagccacagcagtttatcggtgttgaacgcgctcgcagacttgctcaccgcaccgagggagaacagcttgatcatctcttcgcgagtgaagatttcctgatcgccgctggaccagcccagacgcaccagatagttcagcaacgcttccggcagataaccgtcatcgcgatactgcatcacgctcaccgcaccgtgacgtttagacagctttttaccgtcgtcgccgttaatcatcgacacatgcgcgtacatcggcaccggcgcgtttaacgctttcagaatgttaatctggcgcggagtattgttgatatggtcttcgccacgaatcacatgggtaatttccatatcccagtcgtccaccaccacacagaagttgtaggttggggaaccgtcggtacgacgaatgatcagatcgtccagctcctgattgctgaattcgatcgggccacggatctgatcatcaaaaataacggaaccgtcctgcgggttggcaaagcgcaccacgcatggctcatcgtcggcatgatgttcgtgactgtgacggcaacgcccgtcataacgcggcttctcgcctttcgccatctgatcttcacgcagttgctccagacgctctttagagcagtagcatttataggctgttcccgcctccagcatctcgtcaatcaccgcgttatagcgatcaaaacgtttggtctggaaatatgggccttcgtcccattccaggttcagccagttcataccatccatgatggcttcaatggcttccggcgtggaacgctcaagatcggtgtcttcaatacgcagcacgaactcaccgccgtggtgacgtgcgaaaagccaggaataaagagcagtacgcgcgccgccgacgtgcagataacctgtcgggctaggcgcgaagcgagttttgattttcatgaaatggccttacgtttataaagatgccgacaaccggcaaatcctggaaagatgaatagccttgtattctatcactgtggcttgattcctcaatgttgatccggtcagaacgctgcgctttgctatttccgtatagaaatcatgcagtgcggggtaattcacgatcgttttgtttaattttacgacgaacaaacaaaaactttagaaaatgcgttgactcattttcaactctccctataatgcgactccacacagcgggggtgattagctcagctgggagagcacctcccttacaaggagggggtcggcggttcgatcccgtcatcacccaccaactactttatgtagtctccgccgtgtagataagaaattgagaagtgggtgattagctcagctgggagagcacctcccttacaaggagggggtcggcggttcgatcccgtcatcacccaccactttctcgccagctaaatttcttattgtgaagtaccgaagtgggtgattagctcagctgggagagcacctcccttacaaggagggggtcggcggttcgatcccgtcatcacccaccacttcgggtcgttagctcagttggtagagcagttgacttttaatcaattggtcgcaggttcgaatcctgcacgacccaccaatgtaaaaaagcgccctaaaggcgcttttttgctatctgcgatatggaagattcgaacctgtcgcaggttcgggtcttgcctgatgcgctgcgcttatcaggcctacagacgacaccgcacacgtaggccggataagacgttagtcgccatccggcacagacattataccgtcaacgccgccaccagtttctccagtgctggcgttgcctgctgctggtcatacacaatatacaaatccgccggaatacgttcctctaacggacggaacaccacacccggccagctcatttgcgcatagccatcagccatcaacgtaatcccgatccccatactgatcatcgccaacaccgtttgcggctcaaccacttcccgaataatcattggcgaaaagcctgcctgttggcatacacgttgtaaaaatccccaatcagaatgtacggaaggcaacgtaacaaaatattcattgcgcaacgccgccaacggcacagaatctctggatgccagatcgtgatcttccggaactgcaaccatgaatgcagattcatgcaaacgtatgctggtaaaaccgactgctggttcgatagccatacgccagatccctgcatcaagttcccgacgctctaacaacgccatttgcataccgggagacttttcgcgaaaaagtacttcaacattgggatttgctttcaaaaagtgacgcatcgcaggacgcattcttccccacagcgccgtaccaaccacacccagttcaatgcgccccgcttcaccgcgaccaatctgctccactcgcgccagcgcctgatttgcactggctaacaagcgacgtgactcctccattaaaactttcccggcatgggttaatgcaacgctgcgggaatgacgaataaacagcaatgtacccagttgctgttcaagttctttgatatggatactcaagggaggttgtgacatatttaaccgggcagcagcccggccaaaatgcaattcttctgcaacagcgaggaaataacgtaatagctttagatcaatacgatgggctcgttccatcactatcgcactccaggaataagggataacgtctggaatttaccatattacctagtaaaaaatagatttaacgacaagatacccaatatacataaatacaatagataataccccgggtaaaacatttggtgcgggaataggtatacggcataaagtaaaaaatgcgccaataccaaatccaataccggaggagagaataatttctttcatgctgtgtccttgttcataaaaatggactggcgaacatcctctcgccagtcaaataaaattaatgtgctaatgatttggtcgacagtttttctggatggtgctgatatttaaagaacaatgcaaaaataacggccaatgccagagcgtaggcggcaaagaccagccagatagtttgccaatcttttacgccatcaatagaaaaataatccacggccataccgcttaaaagagacccaatccacgcccccacgccgttaaccatggtcataaatagcccctgcgcgctggcgcgaatacttgagtccacctcctgctctacaaatactgaccctgagatgttgaagaaatcaaatgcgcagccataaacaatcatcgacagcagcagtagcacaaagccaaacggggatggatcgccaaaggcaaagaagccgaaacgcagcgtccacgccagcatactcatcagcattaccgttttaataccaaagcgtttaaggaagaacggaatggtgaggataaagcccacttccgccatctgcgaaactgaaagcaagatagagggatacttcaccacaaagctgtcggcaaactcaggattacgggcaaaatcatgcaggaacggattaccgaagacattggtaatttgcagcaccgcccccaacatcatcgcaaacaaaaagaagattgccatgcgtggatttttaaacagaacaaaagcatccagtccgagcttactggcaagcgtggtgttcgccttcttctcggctaccggaattttcggtaacgtcagcgcatacagggccagcaataacgatgcgccagaagcgatgtataattgcgcactgctcagttccagccccatcaggctcaccgtccacatcgcaacaataaaacctattgtgccgaaaacgcgcacaggcggaaatgacgttaccggatcctgacctgctttcgccagacaggagtacgaaacgctattggataatgcaattgttggcatatacgccatcgcattcaccaacatcacccagaacatcgtctggggatcggtaacggtggtggcgtacaataacgcccccgcgcaaaccagatggcaaagcatgtaggctcgctcagcgcgcagccatttatcagcaatgatccccataatacccggcatgataatcgctgccagtccttttgagctgtagaccataccgacattcgcgccggtaaaatccagagtgttgatcatgtaagagcccagggtaaccagccagctcccccagataaaatattgcaagaacgacatgacttttaagcgggacgtaatacccattttttattccttgccgtgagataaagccccaatacggggccgtagtcattgtgtttaggccagcttacgtaaaaagccgcaaatcagatttataaagttctgccgggaaagttcagccgccgccagcgtttgcgcatgggagagttttacatcgcccagcccttccgccagattggtgatcgctgagacggcaacaactttgaggccacaatgacgtgcgctaatcacctcagggacaacggacattccgaccacatcgccgccaataatctgcatcatgcggatttctgccgccgtttcgaagttcggacccggataagaaacaaatacgccttcagtgagggtgaatccctcctctgccgcaacggactgaagcatggcgcgataatctgcgtcataagcattagccagcgagaagaagcgatcgccataacgatcatcgtttggccccaccatcggcgtaccgggcatcgtattaatgtgatcgctaagcgcaaccaggctacccggccccacttccggacgcagagatcctgccgcattggtgcagaacaacacttcacagcccagtaatttcaacgtgcgaatggcatcggtcatcaccgccattccacgcccttcataaaaatgtccacggcctttcatacaggccaccggaacccccgccagatggtcgagcaccagttcaccagcatggccgtgtacggtgctgacgggaaatcccggcaatttctcgtaagaaatggctaccgcatcttcgatttggtccgccagagcacccaacccggagcctaaaataaacgcaactcgcggggtaaatgccggtttatgtgcatgaacaatatcaacacaatactcaggattatgagaaaaaagagcgtgaggcataagtttccttgttctatcggatttaatttgactcctttttataacgaccatcgccccttgctgaccaatacacttttcacgtgtcatcaatagccatttaatatcgataaatttagatcgcttctgtattaatacagagggaaaacagtattggtttttgcttgcaattcatattaacaatatgccgctttcatatttataaattgcctctttttaattaacccattaataattatcggcatagggaaatatgctatgaaaaaaattcttactctgacgctttcttctttactcattattcccgcactcacccatgcggaatttaaaggcgggttcgccgatatcggcctccattacctcgactggacatcagacaccacggaaaaaaccagtaaaaaatcccataaagatgattttgggtacctggaactggaaggcggagcgaattttagctggggagaaatgtacgggttcttcgactgggaaaatttttacaatggccgccacgctaaaccaggcagcgaacagcgttacacctttaaaaataccaaccgtatttatctgggcgatacaggattaaacctctatctccatgcctacgggacgtacggttcacctcatcgcgctaatttccatgatgacatgtttctctatggtttaggctataacttcacaggtaacggttactggtttaaacccttctttgccaaacgttataccgatcagacctactacacaggcgataatggttatgtattaggttgggtggccggctatagcttctcgttgggtagtgagaaattcagcgtaacgaactggaatgagtatgagtttgaccgcgatgcgtcctacgctgcgggcaatggcgggaaagatggcattaatggcgcagtagcgctgtggtggaatgcgactcctcacctgaccgcaggagtacaatatcgttacgctgataataagttaggagaatccttcctgcaggatggcattatttactccatcaaatacctgttttaacacacagccctgtcaaaaatggcagggcaagaccgcacctcacacacggacagatagatatttatagctgatacagcggatctttcgccctcgcggcggttaattcgctggcctgggtacgcaccacgtcccacaacgcctgcgccgccgtggagagcgatcggttttttcgccgcgccagcatgagctgcctttcaactacgggcgtcagccgtttaacctgtaagtggctgccctgcgggagcggtaacgccagcgcgggcagcacgctgatgccgattcccgcttccaccattggaaacagcgtggccgggtgaccaatctcctgcacgatatccgcctcaatagcaaaatgggccagcgccgcatcaatcagcggtcgactgccggaagcataatcctgtaagaccagcgaggcctgtttaagatcctgccagctcacccattcctgatgcgccagcggatgatcctggcgacacaacagtaaaaaaggctctgataagatggcttcacactgtaaatccaccgctgcgccgggatcgataacgatgccaaaatccacttcaccctggcggatgctctccagcacccactgctgcggacgatcgtgcaatacaaaatcaatagcgggataaagtgaattactttgggcaatgcattgcggaataagatgcgcagaaatggtttggctcgcggcaacgcgcacggtgccggttaattgtgtccctactctgcctgcatcgcgcagtatgctgttcagttcatcaagcacccgctccagacgcgtcgccagttgttgccccgcctcggtcagcaccacctcacgcgtagtgcgatccaacagtctgacgccggtttgccgctccagctcttttacgctatgactgaccgcagactggctcagtccaatcctgtcccctgcccgactgaaacttttggcctgggcgacggtaataaaaatacgcagttgacgcagtgaatagttcatcgactagattcatatatagatgcaataaatcaattttatttctcaaagcgaaaaacgcaaaatagctgcaccgactttcaggagtttttatgaaactttttcgtatccttgaccctttcacgctgacacttatcaccgtggtactactggcctcttttttcccggcggaaggtggctttgtgcctgtcgttgaaggcattacgacagcggctatcgctctgctgttttttatgcatggcgcgaagctttcgcgtgaagcgatcatcgctggcggcagccactggcggttgcatctgtgggtcatgtgcagcacttttgtgctctttcctgtcctcggcgtactgtttgcctggtgggcgcctgtcaatgtcgaccctatgctctacagcggctttctgtatctgtgtattttgcccgccaccgtgcagtctgcgattgcgtttacttcactcgcgggcggtaacgtcgcggccgcggtgtgctcagcgtctgcgtccagcctgctgggcattttcctgtcgccgctgctggtcggtctggtaatgaatattcatggcgcgcagggcagtctggaagaggtgggcaaaattatgctgcaactgctgctgccttttgtgctgggacacctgtctcgcccgtggatcggcaattgggtcgcgcgcaacaaaaagtggatcgcgaaaacggatcagacctctattctgttggtggtctactcggcgttcagcgaagcggtggtcaacggcatctggcacaaagtcggctggggatcgctgctgtttatcgtcgtggtcagcctcatactgctggcgatcgtcatagccattaacgtctttgtcgcccgtaaatgcggcttcaataaagccgacgaaatcactattgtcttctgcggttcgaaaaaaagcctggccaacgggatcccgatggccaatattctgtttccgacgtcagtgctgggtatgatggtattaccgctgatgatcttccaccagatccaactgatggtctgcgcagggctggcgcggcgctacaaacgccagaccgagaagttacaggcgcagcaggaaagccgcgccgcgaaagcttaaagcgggcgtttcaggggctgtaccagttgcgtcagcccctcggttttaatcagcagcgtgatttgcatcaactcccccagtttacccgccggaaattgatctttacgggcaaaccacagcaaatactcttccggaaggtcgatcaatcgacgtccctgatatttgccaaagggcatcacggtgttggcgatttcaaccagctgctctttttccatctcaggcacccagtaagcggatcatttccgcttcatcaatcacggtaatacccagttcctgcgctttggccagtttggagcccgccgcttcaccggcaatcaccagatcggttttcttcgatacgctgcctgccactttcgcgcccagcgccactaaacgcgctttagcgtcatcgcgagacatctggctcaggctaccggttagtaccacggttttaccggcaaacgggctatcgatctcttgcacattaatgactaccggcgcgggccagtgaaccccttccgccagtagctgcccaatcacgtcacgattactctcttcggcaaaaaagttaaagacgtgcgtagcgaccacaatccccacgtcaggtactttctgcaactcgtcaatggtggcggcctgcagcgcctccagcgtaccgaaataagccgccagccccgccgccgtcgcttcacccacttcacggatgcccagcgcatagagaaaacgcgcaaaggtcgtcgttttggatttttccagcgcgttaacaacattttgcgcggactttggccccattcggtccaggccggtcagtttacccgccgtcagacggaacagatccgctggcgtatggacatactccctttccaccagttggtcgatgatcttatcgcccatcccgtctacatccatcgcccggcgcgacacaaaatgtttcagcgactctttacgctgcgcgccgcaaatcagcccgccggtacaacgggtaacggcttcgccttcaacgcgctctacgtccgatccgcacaccggacagtgcgttggaaacacaatcggacgcgtctcttcagggcgttcggacagaaccacgttgaccacctgagggatcacatcgcctgcccgacggataaccaccttatcgccaatgcgcaagccaagtcgctcaatttcatcggcattatgcaacgtggcattgctgaccagcacaccagccacctgaaccggttccagacgcgccaccggcgtaatcgccccggtacgcccgacctgaaactcaacgtcgcgcacaaaagtcatctgctcctgagcaggaaatttaaacgccaccgcccagcgcggcgcgcgggccacaaagcccagcagttcctgcaaagccagcgagttgaccttaatcaccacgccgtcgatatcaaaaccgagcgtagggcgatctttttcgacgttgtgataaaaatccagtaccgcctggggagaatcgcacagcgtcacgcgatcgctgaccggtaacccccacgctttaaattgcagcaaacgtcccagatgcgtatccggcaactcgccgccttccagaataccgacgccgtagcagaaaaatgttagcggtcgcttcgccgtaatacgcggatcgagctgacgcagcgaacccgccgccgcgttacgcgggttagcaaacactttgccgccagtgcggcgcgcgtcttcattgatcttttcaaacccggcctgcggtaaaaatacctctccgcgaacttcaagacgcgccggaatgttatcgccgtgcagctttaacggaatggcgcgaatcgtgcgcacgtttgaagtgatatcttcaccggtggtgccgtcgccacgcgtcgcagcgctcaccagcacgccgttttcatacagaatgctgaccgccagaccatccagctttagctcgcagcaccagatgacattttccgtgctttttagacgatcctgcactcgcttgttaaacgccaggaagctttcttcatcaaatacgttatcgagcgacagcatcggtacttcatggcgaatctggttgaatgccgtcagcggcgccgcgccaacgcgctgcgtgggcgaatccggcgtgataaggtccggacgttgcgcctccagctctcgcagttcccgcatcaggcggtcatattcggcgtcgggaatctctggcgcatccatcacatgatacagatattcatgatggcgaagcgtggttcgcagttctgtcagttgttgttcgattggttccatatcacaccatcaatgataaaaaacccccgacaggcgggggttacgttaaaaatgtcacacctgcgttaacctcaggcgttagcgtccatcacctcgcggatgcggtcctgatattcgcgcagtttctgcggcgtcatcatccgacgctggtcatccagcacgacgccaccgacctcatcagcgatatgctgcgcggattgcagcatcagcttgaaattctgcagcgcatcgccgtaagacggtacctgcataaagatagtgacgccaggcgtagtgaagtccgtcatttcaggatcgaacgttcccggattgaccatattcgcgagactgaacaaggccgggccgctgccgtccgggctcaaatgacgatggaaaatattcatatcgccaaatttaaagcctgactgctgaatactgttcagtaacacttcaccattaagctcgctgccatgatgggccgcgacgttcataatgatgaccgcctctttacgctgcggtttttccacaaccggcgcttcttccactaccggttccgcctcaaccacaggttccgcaggctggaaggtttgcgctgatggcggcggcgcgggctgcgcaacaggctgcggcgcttgcgacggcggtgcaggctgctgttgcggcggctgtaccggcggcgcagatggctgaacctgctgaggctgcggcgcaggttgaaccggttgctgaaccggctgttgcatcggcgcttgcggctgcggcggcgccgctggacgcggttgcgcagacgcataaggcggctggtactggtgttgcggcgactgacgaggggcatcatgctcctgcgactggccgggggcatgatttacgcggtgaacacgaacttcacccacgccttcgtcttcttcgacatcgtcgtcatacgagtcgtcgtcgcgtttcgatttcatgcgttttagtggacgatcgcggaacatagaagatcgttctttacggctggtccagaaaccatgtaccagtaaagcgattatggcgatcgcgccaacaatgattaatatcagacgcaaatcctgcatcattatattctctgttgttctaacaccttgccaccacggcaaacatttactcactaagagtatttgccgattacgtcaagtgcaagtgtactgttggctttcgcagcataaagatgaaggaaaatgtgctttttgctgttttttcgaacatttccgaactatccaccgtctgataaccgggtaagatatcccacgtttacccagggctttaagaaaaaggagtatgtcctgaatatggtttcatcatccacaaccgtaccacgtagcggcgtctattatttctcgcaaggatggaagttagtcaccctaccgggaatccgccgctttgttattttacctttgctggtcaacattgtgctgatgggcggcgcattttggtggctgtttacccagcttgacgcctggataccttcgttgatgagtcatgtgccggactggctgcaatggctgagctatctgctgtggccgattgcggttatctctgttctgctggtctttggctattttttctctaccctcgccaactggatcgccgcgccgtttaacggccttttagccgaacagcttgaggcgcggttaaccggcgccacgccgccagatacaggcatactcggcatcatgaaagatgtaccgcgcattatgaaacgtgaatggcaaaagctggcgtggtatctgccgcgcgctattgtgctgctgattctctattttattcctggcattggccaaaccatcgcgccggtgctgtggtttttgttcagcgcctggatgctggcgattcagtattgcgactatccgtttgataaccacaaagtgccgtttaaaacgatgcgcgccgcgttgcgcacgcagaaggtggcgaatatgcaatttggcgcgctcaccagcctctttacgatgattccggtgcttaacctgttcattatgcctgtcgccgtctgtggcgcgacggcaatgtgggttgattgctggcgtgctaagcacgcgttatggaaataacgtaaaaatgtataaataagagatggcttatgctgtctcttattccatactgataaccattatttcccatcagcatatagatatgcgaaatccttacttccccatatctggctggaaggtatgctgggaaggtatcccaatttcatacagttaaggacaggccatgagtaagatttatgaagataactcgctgactatcggtcatacgccgctggttcgactgaaccgtatcggtaatggacgcattctggcaaaggtggagtcgcgcaacccgagcttcagcgtcaagtgccgtatcggcgccaacatgatttgggatgccgaaaagcgtggcgtactgaaacctggcgtggaactggtggagccgaccagcggcaacaccggtattgcgctggcgtatgtcgccgccgcgcgcggttacaaactcaccctgaccatgccggaaaccatgagcattgaacgccgcaagctactcaaagcattaggcgcgaatctggtgctgaccgaaggggcgaaagggatgaaaggcgctattcagaaagccgaagaaattgtcgccagcgatccgcaaaaatatctcctgctccagcagttcagcaaccctgccaacccggaaatccatgaaaaaaccaccggcccggaaatctgggaagacaccgatggtcaggtggatgtgtttatctccggcgtcggcactggcggtacgttaaccggcgtcacgcgttatatcaaagggacgaagggtaaaaccgatcttatcaccgttgcggtagaacccactgactccccggttattgcccaggcgctggctggtgaagagatcaaaccaggcccgcataaaattcagggtatcggcgcaggcttcatcccgggcaacctggatctgaaactgattgataaagtggttggcatcaccaatgaagaagctatttctaccgcgcgccgtctgatggaagaggaaggtattctggcaggaatttcttccggcgccgcggttgctgcagcgcttaagctgcaggaagatgaaagctttaccaataagaatattgtggttatcctaccttcatcaggtgagcgttatctgagcaccgcgttgttcgccgatctctttactgagaaagaactgcaacagtgatgccagcatgttaaaaacgcgtaaaaaagcacctttttgggtgcttttttgtggcctgcttcaaactttcacctcacctggcattgattcaccctgccggaactggtatttaaccagactaattattttgatgcgcgaaattaatcgttacaggaaaagcgttagctgaatcgattttatgatttggttcaaatcttcctttcgcggcataatgtttaatgacgagcgaaacgtcagcggccataagttgccagcaacggattgcgtagaacaccttttgtgtcgcgtcccgtttacgccggcgctaacaatacaggctaaagttgagccgccaggctagactttagttccacaacactaaacctataagttggggaaatacaatgttccagcaagaagttaccattaccgctccgaacggtctgcacacccgccctgctgctcagtttgttaaagaagcaaaaggcttcacttctgagattactgtgacttccaacggcaaaagcgccagcgcgaaaagcctgtttaaactgcagactctgggcctgactcaaggcaccgtcgtcaccatctccgcagaaggtgaagatgagcagaaagcggttgaacatctggtcaaactgatggcggaactcgagtaagtttttttccgggttcttttaaaaatcagtcacaagtaaggtagggttatgatttcaggcattttagcatccccgggtatcgctttcggcaaagcactgctgctgaaagaagacgaaatcgtcattgaccggaaaaaaatttctgccgacaaggttgatcaggaagttgaacgttttctgagcggtcgtgccaaggcatctgcgcaactggaagcgatcaagacaaaagctggtgaaacgttcggtgaagaaaaagaagccatctttgaagggcatattatgctgctcgaagatgaggagctggagcaggaaatcatagccctgattaaagataagcacatgacggctgacgcagccgcacatgaagttatcgaaggtcaggccactgccctggaagaactggatgacgaatacctgaaagagcgtgcggctgacgtacgtgatattggtaagcgcctgctgcgcaacatcctgggtctggccattatcgatctgagcgcgattcaggaagaagttatcctggttgccgctgacctgacgccgtcagaaaccgcgcagctgaacctgcagaaagtgctgggcttcatcaccgacgcgggcggacgcacgtctcatacctccatcatggcgcgttctctggaactgccggcgatcgtaggtaccggtagcgtcaccgctcaggtgaaaaacggcgattatctgattctggatgccgtaaacaaccaggtttacgtcaacccgaccaacgatgttattgagcaactgcgcgccgtccaggagcaggttgcgaccgagaaagcggaactggctaaactgaaagatctgccggcaatcacgctggatggacatcaggttgaagtttgcgccaacatcggtaccgttcgtgacgttgaaggcgctgagcgcaacggcgcggaaggcgttggtctgtatcgtactgaattcctgttcatggatcgcgacgcgctgccgacggaagaagagcagtttgccgcctataaagcggtcgctgaagcgtgcggctcgcaggcggttatcgtccgtaccatggacattggcggcgacaaagagctgccgtacatgaacttcccgaaagaagagaacccgttcctgggctggcgcgccgtgcgtatcgccatggatcgcaaagagatcctgcgtgaccaggttcgcgcgattctgcgtgcctccgctttcggtaaattgcgcattatgttcccgatgatcatctctgttgaagaagttcgcgcgctgcgcaaagagattgaaatctacaaacaggaactgcgtgacgaaggtaaagcatttgacgaaagcattgagattggcgtgatggtggaaacaccggctgcggcgacaattgcgcgtcatttagccaaagaagttgatttctttagtatcggcaccaatgatttaacgcagtacaccctggcagttgaccgtggtaatgatatgatttcacacctttaccagccaatgtcaccgtccgtactgaacttgatcaagcaagttattgatgcttctcatgcagaaggtaaatggactggcatgtgtggtgagcttgcaggcgacgaacgtgctacacttctgttgctggggatgggtctggacgaattctctatgagcgccatttctatcccgcgcattaagaagattatccgtaacacgaacttcgaagatgcgaaggtgttagcagagcaggctcttgctcaaccgacaacggacgagttaatgacgctggttaacaagttcattgaagaaaaaacaatctgctaatccacgagatgcggcccaatttactgcttaggagaagatcatgggtttgttcgataaactaaaatctctggtttctgatgataagaaagacaccggaactattgagattgttgccccgctctctggcgagatcgtcaacatcgaagacgtgccggatgtagtttttgctgaaaaaatcgttggtgatggcatcgctatcaaaccaaccggtaacaaaatggtcgcccctgttgacggtaccatcggcaaaatctttgaaaccaaccatgcgttctctatcgaatccgatagcggcattgagctgttcgttcacttcggtatcgacaccgttgagctgaaaggcgaaggcttcaagcgtattgctgaagaaggtcagcgcgtgaaagttggcgatccggtcatcgagttcgatctgccgttgctggaagaaaaagccaagtctaccctgactccggttgttatctccaacatggatgaaatcaaagaactgatcaaactgtccggtagcgtgaccgtgggtgaaactccggttatccgcattaagaagtaattcttgccgcagtgaagaatggcgcctttgggcgccatttttttgcctgtacttgcgccgccatccggcgatggtgcagtgcactgcctgatggcgctacgcttatcaggcctacaaggttgcgaacatttcagcgccaatccacgggttacaactgcgaggtcaccgggcgaaagcacttctcgcgcatcaggatcttcatcccatccgggccactctccagcatcctgcgttcggaatcggacacttgcagctcgcactgatagccgccagtgatgccaaacatcgctcgcgccacgcagatatcttccagcgcgtccagcccgctcgtttcaaaatgccccacgatacgtccctgctggcgaaccaccagccgataactcttcatcgcgcctcccctgccggcggcagaattaactcatcacagccacactgctgtgtccaggtcatcacctccagcacgcgctgcgccgcatcttttgccgcggtcgtcagttttttcccctgcacaataccgctgaccagctcggcgcagaagagatctcccgtcccttttaactccgtcgccacccgcggatgggcaaagacctccacgacctgcgcagtaacgaccgcaaccgttatggtctccagagactcgcccggcgcgctggtgataaccacccatttcaacgtatcggaaagcagcgattgcgccgccgccaccgcctcttccagcgtgcggcacggtttaccactcagcatctccagctcaaatacgttcggcgttagcccctgcgcctgcggcaacaaatgcgtgcgataagcctgcggaatttccgcctgcacatacattccactgtcggtatcgccaatgaccggatcaacaagaatacacacctccggatgcgaagcccggatcgccattagccacttcgaaagcaagacaatttggtctgcgctgcccatgtaaccggtggtaatcgcttttaattcacgtagcgcatcgcgctcattcaacgccgtaaggtagcctgcaaaccactcggcgggaataatgccgccataaaaggttttatagtgcggcgtattgctgaatagcaccgtcgggaccgccgtcacgcgtagtccctgcgctttaatggccggaacagcgatactgttgcctacgctgccgtacacgacctgtgactggacggcgacgatatcggtctgtaatgcccgatggttgtcgtcgaagagcactgactgaatatcactctcttgtcccataaaattttcctctcgctggacagcaggctaccgcctcattatcattgtcatatgctaaaattcattttgtcataggtcaataatgatcgacggaaaaaccgctaacgaaatttttgacagtatccgtcaacacattatcgccggcacgttacgggcggaggattcgctcccgccggtacgggagctggcaagcgaattaaaggtgaaccgcaataccgtcgcagcggcgtataaacggctgataacggcgggactggcgcaaagtttaggccgcaatgggacggtgattaaaggcagtccgtctcccgtagcgctggaaggcggcgatccacatacgcctctgcacgacctttccggcggcaatcccgatccgcagcgtctgcctgaccttagccgttattttgcccgtctcagccgcacgccgcatctctacggcgatgcgcccgtttcccctgaactacacgcctgggcggcgcgctggctacgggatgccacccccgtcgcaggcgaaattgatatcaccagcggagctatcgacgccattgaaagactgctttgcgcgcatctgctgccgggcgacagcgtcgcggtggaagatccctgttttttaagcagtatcaatatgctgcgctatgccggttttagcgccagcccggtcagtgtggatagcgaaggaatgcagcctgaaaagctggaacgggcgctaaatcagggcgcgcgggcagtgatcttaacgccgcgcgcgcacaaccctaccggctgtagcctgagcgctcgccgtgccgctgcgctgcaaaatatgctggcgcgttaccctcaggtagtggtcattatcgacgatcacttcgccctgctttcttcgtcgccctggcagccggttattgcgcagacaacgcaacactgggcggtgatacgctccgtttccaaaaccctcggccccgatttacgtcttgctattgtcgccagcgacagcgcgacctcggcaaaacttcggctgcggctaaatgccggtagtcagtgggtcagccatctgttacaggatctggtctacgcctgcctgaccgaccctgagtatcagcacaggctgacgcaaacgcggctgttttacgccgcccggcaacaaaaactggcccgcgccctacagcaatatggcatcgccatttctcccggcgacggcgtgaatgcctggctcccactggacacccatagccaggctaccgcgtttacgttggcaaaatccggctggctggtacgtgagggagaagcctttggcgtaagcgcgccgtctcacggtctacgtatcacgctgtcgacattaaatgacagcgagatcaacacgctggcggctgatatccatcaggcgctaaatcgctaacaggagaaaataacgtgcgagttcattttgttgtccatgagtcgtttgaatccgctggcgcttatctgaaatgggctgaagatcgcggttataccatttcatggtcgcgcgtctatgccggagaagcgctaccgcccaatgccgatgagttcgatatgctcgtggtatttggcggtccgcagtcgccgcgcaccacccgcgaagagtgcccgtactttgactctcgcgccgaacagcacttaattaatcaggcagttacggcccggcgaatggttatcggcatttgtcttggttcgcagctcattggcgaggcgctgggcgccgctgtgtgccaaagtccggaaaaagagattggtcactaccctattacgctcactgaagccggtctgcggcatccgcttatcgcccactttggctccccgttaaccgtcggccactggcacaacgatatgccaggactcaccgatcaggcgaccgtgctggccgaaagcgaaggctgtccacgtcagatagtgcagtacggtaattttgtctacggcttccagtgtcatatggaatttaccgtcgaggcggttgaaggattaatccaacattcgcagcaggagctggccgacgcgcaagggaagcgttttatccgctcggtcgccgagatgcgcgcatggaattaccagcaaatgaatgaaaagctgtggcgttttctggatgaactcacgctggcgcactcacagaaataaccacaccaggagtgcaacttattacccggctaacggtctgaggtgcagtgattattgcatgaaaaaggattttaccatgaagaaaattgtttgcgccgtcgttgcgctcctgctgaccctacccgcctgggcgaagctgaacgcccatgaagaagcgcgcattaacgccatgcttaatgcgctggcgcagaaaaaggatctgacattcgttcgtaacggtgatgcgcataactgcgaggaagccgtatcgcacctgcgcttaaaactgggtaacacgcgcaatcgtatcgacaccgccgaacagtttatcgataaagtcgcgtcgtcgtcgtccatcaccggaaaaccctatatcgttaaaattcccggtaaaagcgatgaaaacgcgcagccttatttacatgcgcttattgcggaaacggataagaatgttgagtaagaaaaaatcataatgccaggcgtgttactgtggttttttaaaggcgttatcgcgcttctgttagcgtttgctgtagggttaatcgtttactattatctggaaattcgtcccatagcccagaccgcattacagagcgcctctttctggttgtccgaatcgccgcagacgcgttttttgcgccgcgctgcggccaaaatacatcccaaatcttatactgccagattgctctatacccaagctggcgtggatgggcatttcaggatcgcgatctgggtgttctggttggacagcctgtaccgcgacgacgagctgtatgccatgatgctggcgcaagcgtattatggccgggattcgcagggtaacgcggtttacggtacgaaaaatgcggcgttaacgttatttcacgtaccagtgacagagatggcctgccagcaacaagtacaactgatttatatgtttaaagcgccgtcactttaccggcctggttcagccaggctggtagaaagcagcaagcattacatgacgctttgccaggaacaaatacaacaataagaacaacagacgagcttttattataaaaggcggcggtaatgcgctggcgcacatagaaaatcggcaggatattcccgcttgtcaaaggcgccgttgcctgtgtttatcccaatcagctgaactcattagtttaaatccctgccccctggctgaaatgctcttcaccaaacacgccggtcgaaaggtaacggtcgccgcgatcgcagatgatcgccaccactatcgcgccgggcgtggctcgtgcgacgcgtaacgcgcccgctaccgcgccgccggaactcacgccgcagaaaatgccttcacgaacggccagttcacgcatggtgttttcggcatcattctgatgaatatccagcacctcatctaccagcgaggcgttaaaaatgcccggcatatattccgcaggccagcgtcgaatgcccggaatactgctgccctcttccggctgtaggccaacgatggtgaccggtttttcctgctcgcgcagaaaacgcgacacgccggtaatggtgccggtcgtgcccatgctggagacaaaatgggtgatgcgacctgacgtttgccgccagatttccgggccggtggtcgtgtagtgggcgtagggattatcaggattattaaactgatcgagcagtttgccctcgcctcgttcagacatagcgagcgctaaatcgcgcgccccttccattccctgctctttagtgaccagaatcagttccgcgccataggcccgcattgccgcccgacgctcctgactcatgttgtctggcatcaacagcttcatgcgataacctttcagcgcggcgatcatcgccagcgcaatgccagtgttgccgctggtcgcttcaatcaggacatcgcccggtttaatttccccgcgcttttccgcctcgacaatcatcgatagcgccgcgcgatctttcaccgatcctgccggattattgccttccagcttgacccagatttcactgccgttatccggccccagacgttgtaatttgaccagcggcgtattgccgatggtttgttctaatgtattcacgttttcagctcgtaaaaaagcccggtatgcgtagcgccaccgagcgataactatacaaattaacctatcaggccgattgcgccagagcaagttcctcttcacgcgtttcaatacgctggtcgccgttatacagacgcgctttttgcagtccaacaaacaaacgctcgccgcgaaccggaacatcctcacccgccatcaccaccgtcagcggatcgtgataccaccccagcggctgtaccactaactgtgtatagtgacctttcgggctggcctcaatgacctgtactggtagaggagaatccaggctggtgcggcggctaatatccacctcccacggacgcaggaacagatcgaccggcccctggtacgcgggcgtataacccagcggccagcgatgcgcgccaacgtgaaactgcccgccgcggacggtgcctgtcaggcggttcacctcgcccataaactccagtacgaagcgggttgccggttcacgccacacccgatccggcgcatcagcctgttcgatattgccctgactcatcaccaccacccgatccgccacttccgtcgcctcttcctgatcgtgggtgacaaagacgctggtgaatttcagttcttcatgtagctggcgcaaccagcgacgtaactctttacgtacctgggcatccagcgcgccaaagggttcatccagcagtagaatttgcggttccacggcaagcgcgcgcgccagcgccacgcgctgtttttgtccgccggaaagctgggcggggaagcgatccgcgaggtgcgccagttgcaccatctccagcaattgcgtcactttcgttttaatcgccgccgcagttgggcggtcgcgtcgcggcagcaccgtcaggccaaaagcgatgttgtcaaacaccgtcatatggcgaaacagcgcatagtgctgaaacacaaaaccgactttacgctcacgcgcgtgcaggcggctaacgtccgtaccgtggaaacgaatatgaccgctggactgatgctccagcccggcaataatgcgcagcagcgtcgttttgccggaacctgacggccccaacaaggcaaccatctggccggaaggaatatccagcgagatatcattcagtacctgagtgcgaccaaaggatttcttaattctggcgatctcaatgctcatgattttcctcctgttgcgcgcgtttttcctgattctccagacgccattgcaacatgctcttcaaaaacagggtaataatcgccattagcgtcaacaatgcggcggcggtaaaggagccgacggtgttgtagtcctgctccagtaattcaatctgtaacggtagcgataacgtttcgccgcgaatcgagccggacaccaccgacaccgcgccaaactcgccaatcgcgcgggcgttggttaacaccacgccgtagagtagcgcccagcgaatattcggcaacgtcacgcggcgaaacatttgccagccggatgcgcccagtaaaatcgccgcctcatcttcctgactgccctggctgagcatcactggcaccagttcgcgcaccacaaacgggcaggtgacaaaaatagtgaccagtaccatccccggccaggagaacatcatttgcaaattatgctcatccagccagccgcccaacgggccgttggaaccataaaacagcagataaaccagaccggccaccaccggcgagacggcaaagggaatatccagcagggtcagcagtagctgacgtccggggaagttaaagcgcgtcaccagccacgccagcagaatgccgaacaccagattcaccggcactgcgatcaaggcaatcaacaccgtcagccagatggcgtgcagcatgtccggatcggccagattttgcagtaccggcattaaccctttgctgaacgcctgcacgaagatgtaaatcatcggcaccagcaggataaacgccgaaaccagcatcccgacgccaatcagaaaccattttccccagttaatgcgggggacgtcgtatcgcttcaattgagtcacttccgccattaatgacctaccacacgtcgaccaaagcgactttgcaaggtattgatagagaacagcagcagcaaggatgccgcaaggatcaccgaggcaatggcgctagcggccgggtaatcaaactcctgcaagcgcacaaaaatcatcagcgaggtcacttctgttttccaggcgatatttccggcgataaaaatcaccgcgccaaactcgcccaggctacgggtaaaagagagcgccacgccggcaatcagcgcaggcgacagctcaggcagcacgactttgcgaaaactttgcagccgggtggcccccagcgtttgcgccgcttcttcatattccggccccagctcttccagtaccggctggacggtgcgcaccacaaatggaatactggtaaaggccatcgccaccgcaataccgagccaggtataggtcactttgatatcaaactgcgcaagaaactgaccgtagaaaccgttcactgagaacagcgaggccagcgttaaccccgctaccgctgtcggcagcgcaaacggcagatccatcagcgcatccagcaacgtgcgccctggaaaacggtagcgggttaaaatccacgccatcagcaggccaaacacgccattaaaaatcgacgctacaaatgccgccagtagcgtcactttataggcagccaccacctgagggttggtcacgacatcccagtattgcgcccagctcatctgtgagagctgcatcaccagcgcgctcaacggcaacagtaggatcaggcagacaaacagcaaactggtgccgaggcttaacgtaaagccgggcagcacgcgtcgggaagaaacggcaagcattacttacgccccgccgccaacagtttgtccagctcgccgccgctggcaaagtgcgttttcatcacttccggccaggaaccaaacttttcttccacgcggaacagttcggtctgcgggaatttatctgcttgcttgcccatgatttccgggttattcacgcggtagtagtaatgggtgatgatggtctgcgcctgcgggctatacagccagttcaggtaagctttggcggctttttctgtgccgttggcctgcacgtttttatccacccaggcaaccgggaattcagcaagaatgttcgttttcgggatcaccacttcaaatccctgggcttcatattgtttgcggatattgttcacttccgactcaaaactaatcagcacatcgcccagaccacgctcggcaaaggtagtcgtagcgccgcgaccgccggtatcaaacacttcgacgtttttcaggaactgggtcataaactgttcggttttggctttatcgccgccgtccgcgttatccgccgcgccccatgccgccagatacgtgtaacgggcgttgccggaggttttcgggttagggaaaatcagcttcacgtcggaacgtacaagatcgctccagtcgtgaatatttttcgggtttcccttgcgcaccaggaaacccatcgtggaatagaatggcgaactgttgttcggcagacggctttgccagtcggcagggatcagtttgcctttatcatgaagaatctgtacgtcggtcacctgattgtaggtgacgacgtctgccttcagtccctgcaaaatcgccagcgcctgttttgatgacccggcatgagactgcttaatcgtcagcttatcgccgccgttatccttcgcccattgttgctcaaacggcgggttaagggcggcaaacagctcgcgggagacatcgtatgagctgttcagcagctccgttgcctgcgcctgccctgccagtaacagcattgctgccagcgtcaggggtctctttttcagtaagttaacggccattgcgcacccttataaatttaatgactttcttatggtcatcatatttataaccagcgctaaaggagtaacggttttatataccgtttgatgatttgaaagttgaaaagggaataagagaatccctccccacgcggcgtgaggaggagaccggcatcaatcagacgcctacgcttacgctttcaggcagggtactgccgccatcaatgacgttttgcgttccggtaagatagctggactcatcggaagccagaaatgccgccagttcccctacttccagcggatcggcaaggcggcgtagcggaatggcttttgccatttccgttaataccgattccggatcgtcagggttagactgacgggcaatgctttccgccatcggcgttcttacataaccggggcaaatggcattcacacgaataccggactgcgcatactctaccgccagcgatttggttaaaccgacaatggcggcttttgacagcgcataggccgtttcacccgggtccgccaccatatctcccgtgacggaagacatcatcacaatgcggccatctttacgtttaatcatctccggcaggacggctttggtgacgttccagacacctttaatattaatatcaatgtggaaatcgcgatcttcttcactcatatcgaggaagttgcccagacggcacacgccagcgttattcaccaaaatatcaattctaccttcagtctctttggcgcgcgcaaccgccgcctgcaccgaagcaaaatctctgacgtcagccttaacggcagtgcagcgatgcccgcgcccgcccagctcatccgccagtttttcaatctcatcggagatatccagcaagattaagttcgcgccgtggcgtgcgaatacgcgagcgatcccttcgccaatgccctgcgatgcgcccgtaatcaatgctgtcttgcccgtgagtttacccattttcaatgtctccttttgaatatggagtcttacactccattaacactgaaaatacagtaataacaaataagtgctgaggaatagctcactaattcaggtaaatattaggtaaaaaaatccccgcggaggcggggatgggcatttttatgctgttctgcctgatggcgctgcgcttatcaggcctaccaatcgtaggtcgaataaagcgtttgcgctgccatccgacagggttttaccttatagcgctaacaggcgatccagcgacggcgcaaaatagtagccgccagtcaccggtttggtgaagcgcagcatcgcgtcgcgtttaccgtcggtatcgccgaacatactcagaagctgctgttcgatattgtgcagacgtgcgcagtaagcgcagaaatagagaccatgagtaccgctggcggtgccgtatggcaggctctggcgcacaatcttcagccctttgccatcttctttgagatcgacgcggctcaggtgagatgttgccggacgcgcatcgccgtcaatctcttcattggcttctttggtacgcccgatcatcatctcctgatcgtgaatactcatccggttaagttgcttgagattgtgttcccaacgctgcacgaacacataactgccgccggcatccacgccatctttgatcaccgccacttcacggcgcgtctcttcgcccgccgggttctctgtcccgtcgacaaagccgctcagatcgcgttcttccacccaacggaaaccgtgaacttcttctttcacgtcgatacagtcgccgaaggcttccatcgccgcctgggcaacagaaaaattcacatcgtggcgcagggaaaggatatggatcagcacgtcatactgcgtggccggtgccagccctttaccataaggaataaaatctttcagttcttccgccccgacgccgccactcagggcacgccaggtattgttgccaaacgccacaacggccccaagatgggcgtccggaaatttgacttcgaaggtcgccagtttatcggcaaatgttctgctggccgcgcgcagggcgtccaggtcgcctttcacattggcttcaatccaaattgccgcacggcaatgttccggcaaaatgccactttgaacctgagacatgattcctcctgaaaatgagaatgccacgcagtcgtggcattaatggaggctattttaccttgtttttaagcgaagcggtttgttcaggcgcaaattaacgacgccagataattttgcgcacgtcccagttttttaagacgtcatcaggaggcattaagccttccggtccgctccactcgccggagaaaacatagctaatatgctgacttccctcggctttacattcgacgctggtatggctatcgctggaaaccggctcgcagtgaccaaacgctttgctgtaaaggtcgctaaacggcgtaccgattttgccccccgcggcggttgggatatcgctgtccagcacatcaatacggctcacggttccctgctcgccgttgatcaccatcgcgacactgtcgcccttcatcgcttcgaaaaagcgcaccacgttgccgttatcggttttcataccgctacgcaggcgataatcgccatctaatgcctctgcaatagccggctcttccagcggcgtggcggcggtcagcgctcccacgccttgctcagtgacttctgtcgaggaaccaaaccagttccatggatttgcggcagaccagttgaccgaggagagcgtcgagcagccggtcaccgccagcggcagtgcgagtaaagtcaaacgcagcgatttcatctcacttcctttcttttattaattaacgttggttggagtgcgggttcgccaaaaagtgccgttattctttctcaagggaaaaacaggcacgcaaacgttgattggttaacagccagatcagcgcgacgatgtccgccagcagcagcgccagcccgacgccgttgaccgggtcgccacccagccacatcaccggcagccagcacaacgacaccagttgagcaaggatcaggagtccgcgcagccagcgccacacaccaggaaccgcgtcacgccgcccgctgagtaaaaatgccactaccgccggaacgccgggcaacagccccagccaaaaattgtcatggtcgggataaaaaaagtttaacaaagtattaccctgtccacgggatgaaccggcaatgacaaagagtacccaggcgcgcgcctgaagtagcagtacgcaccagaacagaaacggcaggcgtaaacgtccgtgtacatcataatcggctggatgaaactcagtactcttcatcttcaatcaggcgtttacccaaacttagggcgtcagaatgctcataccccagacgttcatacatgcccagcacaacgtcgttatcatcgcgcaccataatttggattttcggacacccgcgagcgatgagttttttttccagccggttaagcaacgcattcgcaatgccgcgcccgcggaactccgggtgaacgcccaggtaatacgccgagccgcgatgcccgtcataaccgcccattaccgtaccgacgacttcgccgctaacttccgcaacgaggaacaagctgacatcgtgattcaccttgcgttcaatatccatttcaggatcgttccatggacgcagcaggtcgcaacgctcccagagggtgatcacctcttcgaaatcttcctggcgaaaaacgcgtatttccatggtattcgttgccttttcgggtggaaaaaccaagattatggcgcaaacatctgattcagccaatatctgacgcgatgtagcggaaaaaatggcataatggcgatgtgtcacgtattgaaatgaaaagtaaaacaattctcatcaccaaccgtcgtaacggattacgcgatacgatataacatcttgaacttaattttcacaactcaggccgtatgagcacttttaaactcctaaaaactctcacatcgcgccgccaggtactcaaaacaggtctggcggccctgacgctgtcaggtatgtcgcacgcagtagccaaagaagaaacgctaaaaaccagtaatggtcacagcaaacccaaaaccaaaaaaaccggcagtaaacggttggtgatgctcgaccccggacacggcggcatcgataccggcgcgattggccgcaacggttctcaggaaaaacacgtcgtactggcaattgccaaaaacgtgcgcgctattttgcgaaatcacggaatcgatgcgcgtttaacccggacaggggatacttttattccgctgtacgatcgggtggaaatcgcccataagcacggcgcggatctgtttatgtccattcatgccgatggttttaccaatccgaaagcagcgggcgcttccgtttttgcgctttccaaccgcggggccagtagcgccatggcgaagtatctctccgagcgtgaaaaccgcgcggacgaagtggcgggtaaaaaagccactgaccgggatcatctattacaacaagttttgtttgatctggtgcaaaccgatacgattaaaaacagtctgacgctgggttcgcatattctcaagaaaatcaaacctatacataaattacacagccgcactaccgaacaagcggctttcgtggtgctaaaatcaccgtcaattccgtcggtgctggtcgaaacctcgtttattaccaatccggaagaagaacgcctgctgggcacgacggcgtttcgccagaaaatcgctacggcgatcgccaacggcatcatcagttattttcactggtttgataatcagaaagcacacacgaagaaacggtaatcatgaaacccgatgcacatcacgtaaaacagtttctgctacgcctgcaggatgatatttgccaaacgttatccgctgtggatggcgcaaactttgtcgaagatagctggcgacgcgaagcgggcggcggcggacgcagccgggtattacgcaacggcgggattttcgaacaggcgggcgttaatttctctcacgttcacggcgatgcaatgcccgcgtccgccaccgcgcatcggccagaactcgccgggcgtagcttcgaagcgatgggcgtatcgctggtggtgcatccgcacaatccgtatattcccaccagccatgctaacgtgcgcttttttattgccgaaaaaccgggcgccgatccggtatggtggtttggcggcgggttcgatttaacgccctactacggctttgaagaggatgccgttcactggcaccgcaccgcccgcgacctgtgccagccgtttggtgacgatgtgtatccgcgttataaaaagtggtgcgacgactacttttttctcaaacaccgcaacgagcagcgcggcgttggcggcctgttttttgacgatttgaatacgccggatttcgaccactgcttcgactttatgcaggcggtcggcaacggttacacccgggcgtatttaccgattgtcgaacgacgcaaagcgatggtctggggcgagcgggagcgtaattttcaactttatcgccgcggtcgctacgtggagttcaatctggtgtgggacagaggcaccctgtttggtctgcaaaccggcgggcgcactgaatctatcctgatgtcgatgccgccgctggtgcgctgggagtacgactggcagccagaagcgggtagcccggaagcggcgctgagcgagtttattcaggtacgcgactggatttaacttatttataaagtaaaacaatgcaaacaaatacacggaaagtagtaaccagtgacgccaaatggcatccccatctgggtataagttttattggctgcctgcttgccattacactagaaatatattttgaagaaagaatattcatccctcatagcggaggggtgagcttcggtctgatcgtgcttctggttatcaatatggtgaccatccctgtggtcatggccctgatagcattactctgctttattattcatattccgcgtaaaagcgttaactgtatcttgctatgcctactgtcatgtattttgacgatagccggtttgtttatcgcctatccggttggccgttgaataaaagcaggctcgtagaaataaacgagttcattgtagataaagaattcggataaccgcccgctgccgttatcattagtaaaacagtacagtaagcactcgtagaatttgcagtggagcactaccgcatggacgagcgtattccttgtaaaaacccgcaatgctcacacttcatcctgccagcaacggctgcccgcacggagggctattgtatgccctgcgtccaggcgcgctatcggcaagtgcaggaagaatatatccggaaaaacagaaaaacgatcgacgcgttcagtggcattaccaaccctgttgaaatgcttaaactcgttcatgaaccccgggaacacgatccgttaatcgagtggattccctgccccattccgaccgatgagctttacaaaaagctctccgatgatgaaagccgcgacatggtcgattatgcagaagaattatttgattccggatggcaggaggaagctcaggaaattgcgctgtgcctggcggcatttacccaggccaatctggataatttcctgcgccaggtaataaatgaagaagaactggagctctcttcacccctaccttttcaccgtgcgccgcctgacgtacgcgacgcgcttttgcagaaggtggaaaccgatgacgaaaaccgtgacggcattctttgtgccctggcctggattggcgatgaggttgtcgttgagcattttaaccgctggcgccaggaaccacctgcgtggagtgcttcacttcatatcctccctcatcgctatgctcaccaggcgggatgggagctcactgaaaatggccgcaggcgcgatctttactttacgcaatgtacccatctggtaaaacaggcacctgaacagccggccgtttttcgcgccgttgcagaatatggtgaaaactgcccacactgttccctgccgctaatcaatctgtttgaggttgcgccgagcgccgtcggcctaagcacgcagggttggcccggtcaaattcgtattctgacctgtcagtgttgtacggcatataacaccgttttcgccaccgtcgatccacaaggccagccgcgatggtacgaaaaaaatgcgctctcgacgctggcggtggagaattccgctgactggataacgctaccgcttgatgttctgcaccccggggaatcccgtttgccgctattcgctgctgaaatatttttacccaccaccttctcacagctcggcggccatcccgcatgggttcaggatacagactatcctacgtgcccaacgtgcgcgcaaacgatgatgtttcttgcgcagctaagctatgaagatatcgaggaagaggaatatgcggaaggaatgctttacgggtttatctgcccctcctgccaaacaacggcaacgtcttatcagcaaacataaacgctcatcctcatgatctgatgacaaaactgttttgcacgttgtgcgcgcgcttccccggaggcggcgctggcgcgccttgtccgggctaccaaccacagacagcagcgaatccgtaggcccggtaaggcgccagctgccaccgggcaattcccgacacgcgcacgttatcagcaaccggagagcctccccatcaatatcaagcccattgccgcatccgttgatgcagcgtcaacgacggtttttcggcaaataattgctgataatcggtggcaaattgccccagatgccagaatccccactgcatcgcggcatctttgaccgtggcgctctgcgaccacgggctaatcagttcccggcgtactgcgtttaagcgaatacgtttcagccacgcattggggccaatgcccaaaatggcgtgaaacgcattttgcagcgtgcgacggcttacgtgtagctggttacataagtcgagcaccgtcagcggctccgacatattttccagcacatattcccgcgcccgcgacagtagcctacgatatccctgatggctgatgctttcggcgctatgaatcggcttcgcctcttccagcatcgtgcccatcgccagcaataaattatcactcaagaccttacgcaccgcaggttgatgcagagtttcaggactctcgctgaaggtggccagcgcctgctgcacaaagccccacagcgctgctttatgctgctcttttacctccagcgctagctggttacgcagcatatgcagcaccctttccgggttatgcaaaaacgtggcctgacgggaaataacatcttccgagataacgacgcccagaatggtgtaatcatccggcgtgctcagttcaaactcggtgcctcccggtcgggtggcaatctcggcgctgccgagcccctgcgcgccgataaatccctgttcgccgcgcgtcgccggaataccaaaccagaaagagtttggccaaaccagacacgactgacgcagcgccaggccggtgtattcacggaacacctgaatctcatcaagcaggatttccgtgaactcgccatgaaatttacccgggtgtaactgatcgtagatctgctgccaggcggtgatagtcagagcatgttcatagacatccgtcgtccgtcgctgatgaacattgtccacctcgactctgggcgtaagtttaacgtcttcgggtaacgcttcatgataaagatggtgcaaattcgctgtacgggtctttttcatgatcttctatgccggacgcccgccaggacgcccggccctccgacagattaatttttgatgcgatagcgactactgcgtttacgcaacgctccgtcagaaaagagttgttccagcacgtttctggcctgctccagcggccagccaaaatgcgcggcaacctctcccgccgtcattccctggcgtactgatgccagcagcgccaataacgcctcagcgaactcaggcgttgcgggtacctggggtgctttctcagtcggcgttgtcgcacgcgcaaacccgccaatcagccactgggtgtcctcttccggacgaccaatttctttgcgactaatcacacggcctgtgcgctgcgcggcagcgcttccggcatccagcgccgcacgacacgccgccagatcgccctccaccaccagcgtgagcctgccagggtcgagcacttgatgactgagcaaacgcacgttggccgctttcagcatagcatccgccgcatcgacggcggcgaccattccgtccacttccagtaatcccagggcattgatcattggcagcctccgttacgcacgctggacagggttacgggcgatatccagcacggcgtcggtaaaggcgttgcaggcggctttacacgcggcctggcttcccgttaagaacgcggccgaatagttggtttccgacggcggcggcacgtaagtcaccagctgaacgtcagcggatttcatcgccgcgtcaatgccgaatgtcgcttccagcggcggcgccaccaggtaggccattggatcgcccagcgcgatacctgcggtagacgagaggtacgagccggtacgcgaaaccacatgcgccaggaatgcggtattttccgcatcgttcgcccactggaacgccgcgccgttttcaatgctggcgaccattgcatccagaccggcgcgcacttccgccgggttcggtccgcccagcataatcaacacctcaccagcggtaggcgacggcccgtgagccgccccggcatagagggagcggccatagaccacttccaccatcgcctgttttgtcgcttcgtcagcggcaatataggtcacatcatcagaatctgccgtgatgagtccgagactacgtatatgtggcggtaatttaagttcccgcgcaaagccgtcattcacggaggcaatcacgcgcatggcagtcactgaaggtcgaattaaatctaatgcaggcatgatgtctccttaacgggtcatgttgatgccggacgctttctgctccagcatccgtttggccaaatccacaatcacggcggcggcttctactggcggcgtccccccctgatgaatgtttgaaatacaggttctgtcggcctcgacggtggtcgccacgcgcggggaatagaccgcgtagcaggaaaggctttccgactgccccagccccggacgttcgcctaccagcaggatgacgaccttcgcgccgagaatttcgccaatctgatcttcaatcttcacacggccatagcgcacaaagaacggcgtgccgacgttcagcccggcctgcttcagaccggcaagcaacggcggcaggatctcttcatagttggcggtgatcgcatccgtagagaggccatcggagaccactacctgcacatccgggttcatcacgcactgtgacttcagcgcgtcaatggcttccgggctcaggcgacgccccatatccgggcgcgtcaggtacaggtttttgtcgctgatctccgaacgcacttccagcagcccttgcgcttttacccactcttccggcacttctttgagcacggtatctttcgaacgggagtgatccgccaggaagcgcaacagcgcctgggtgcgcggacgcggcccggcacgccccgtacagacgcgtgccgcagtactgcgacgcagttcggtcagcacgtccgcacgatgtgggttctcgacgccaatccaggcttttgcctccgcggaacctaaatccagcgcgcagctttcggtcaccgtcggcgcggcgcactgcggctttgcgccttcctgcgttgacggcgcggcgggctgcggtacgtcctgtcccattgacgccatcacgctacgtacaatttcttcaatctgtttttgatccatggtgttatccccgcgtcatcagaagaacagtgacggatcgcccgcccgtttggtcagacgaccgtttgccataatgcccatcgtttccagccagcgttcaaactccggcgacggccgtaaattcagcaactgacggacggtggcggtatcgtggaaagcggtggtctggtagttgagcatgatgtcgtcgccgagcggcatccccatgatgtagttacagccggcagtggcgagcagaatcatcaggttttcgttaaggttctggtcggcgtcggcatggttggtatagcagcagtcgcagcccatcgagatgccgctcagcttgcccataaagtgatcttcgagaccggcgcggataatctgcctgtcgttgtagagatactccggcccgataaagcccaccacggtgttcaccaggaacggatcgtagtggcgcgccagcccgtagttacgcgcttccatcgtcacctggtcggcaccaaagttcgcgcctgcggagagcgcagacccttgcccggtttcaaagtacaggcagttttccccggcgatgcggttgaactccgcccccacagcccgcgcttcgtcgagcatggccagctcgacgccgaactcttttaagcccttctcgctgccgcaaatgctctggaaaatcagtccgcccggcgcgccgcgacgaatcgcttcgatctgggtggtgacgtgcgccagcacgcagccctgggtcggaatattgaatttatcgataacgccgtaaacggtgtcgagcacgcgggtcaggttctccacgtcatcggtcaccgggttaacgccgatcaccgcatcgcctgcgccgaaagaaagcccttcgtagatttgcgcggcgatactctgtacatcgtcacgggtatcgttcggctgcaaacggcagctaaaggtgcccggaataccgatggtggtattggcttttttgatcaccggcattttcttgccgccgtagatcaggtcagcgttggagcagattttcgctactgccgccaccacttcggaggtcaggcctttgcgggtaaacgcgatgtcgtccacggaggtttcatcgctcagcacgtattcacgcagttcgctgatgctccagtttttaatccggttataggccgtttcgttgacgtcgtcctgaatcaggcgcgtcacgcagtcctcttcataggcaatcaccggattgttgcggatatccgccaccgtcatttccgacagtacctgttttgccgctacgcgctcctgcgaacttgccgcggcaaccccggccagcacatcccccgaacgcagttcgttggctttagccagtacctcttttacatccttaaactgataaacattgccgaacaatgtggtctttagtttcataagtcgttccctcaggaaggaaatgcgagtgatttcaccgtcaccggcacaaccgatccgccaaaaagaggcgtaccaatgtcgatatagtctcccgcccgcacgaccacctcatcgatgaccgccagcggaagttgcggtaactgtgggcgcaataacatgcccagcgctttaccaaaatcctgctcggccaccaccagcaggggatgtggattgggataacgcgcgacaaaagccgtcagcgcgttgatgaccgtgagtaatgcggcgtaacgcaccggaagcgtggcgggaagcgccagcacgtaagcgtcggtttgcgggtcgagatcaagctggagaagcgcctgccgccaggcgttcaccagatcggcgtcatcctgcgggatcgccaccggcaggttgcgcagcggcagttggacgtcttccagccagatagtactgccggaaagcgagagcgtatgggcccccgcgccaatcaccgtggcgcgcacggtttgcgccggaaactgcacgttcatctcgcgcagacgcgggtgctcatgcagcgcggtcgccagcagcggcccgatatcagaaaagcagaacggatcggcaggttggttgcggtagcattcacctaccccaccggaaagggtgatcacctccggcgtaatatcggcgggcagcagcccggtttgcatcagcgattgcgccagcggcgagagcgcgccagtgataacctcgacgatgagatccgccatccgccgcgccacctgtcccaactgtgcggcagctaaggcgcgagcatcagtacccgaaccgaacacctcatcgataatcatctgccccggctgatgggcataaaccacgcgcccctgagcatcggtttccagcaggcgaccaccgacgttaaggcaggcggtgccgctgacttttcccgcgtcaaacagcgcgtagttagacgtgccgccgccgatatcaatattcagcacccggcacatccgctgctcagacaagctttgcgctccggcgccgtgaccggcaatgaccgattccagatgcggcccggcgctggcgaccacaaagtcgcccagcgactgcgagagcgccatgaccgccggacgggcgttgcgggttttggcgctttcgccggtgataatgatagcccctgagtccaccgattcaggcgcgatgcctgcggcctgatactgggccagaatcagcgctttaagttctacctctttcagaccgccctgcttatccacgggcgtaaagaagaccgggctttgccagctaatgtcgcgtttgatgaattcgtagcgcggcacctgcgacaccgccgcacggttaaccaactccaggcgcgagaagatcacctgcgtggtggtggtgccgatatcgataccgacgctcagtagctggcgagtgttcacgattgcgcctccgcttcggttttcacctgggcggcgtcatctttcggcaccagcatcatcgccacgccaatcgccgtcacgccgccgatcagcttgccgacaatcatcgggaagatcatggcgttcatgttggcagcggcgaagcctaaatggtcgcccagcgcgaacgccgcagagacggcaaatgcgcagttaatcactttgccgcgggtatccatctgcttcatcatgccgaacatggggatattgttcgccagggtcgccaccatgcctgccgccgcaatattattgacgttcagcagtttaccgacattcatcaacggtttttcaaaccagcgggtcagtaacagcaccatcggatacgcgccaagcagcacgcaggagatagagccgatcacttcaatggcgcgcatcacttcgccgggtttgtcgcctggcgccataaagatcgggtcgagtcccggaatcaactcccaacccaacaggaatttaaccaccgcagctgccagaccgatggtgatcagcgctaccagaaatttggcgaagatctggaaaccgttgatcattttttccgggatgaacttcagccccagcgctaccagcaccgcgacgatcaataccgggatcatgttcatcaggatcagcgcgaaggtaaactccactggctgaccattgatctgcacacctgagtacatggcgatcagtccccccgcaatgcagccaatgggaatggtgacgatacccgccagtacgccaagcgccaggtagcggcggtcagacggttcgataatgccgagcgccaccggaatggagaacacaatggtcggccccatcatcgacccaagtattaaccctgagtatagccacgccgcgacatcaccgccggccagctctttggcgaggaagaatccgcccatatcacaggccagcagcgtacccgcgaacatggatgggttcgcgcccagcatttcgtataccgggataataaccggccccagtacatgcgccagcaccggcgccagcgcggtcataccgaccatcgccagccccagcgcgcccatcgccataaagccctcttcaaactggccgccagacccctcgatactcttgccgaatttaccgaggaagcgcgccgacccgccgaactgcgacaggattctgtccacggcggcaatcagcataaagaacatcatgatgtacatgatgatttcgttaattcccatagcccctactccctgtcatttttgatttgtaaaccggataagacgtttacgtcgcctccggcattaacgccgtgttattgccggatggcggtgcgagcaccttatccggcctacaggcattacccggcagccgcgtacaggtcgataatctgtgcctgtgtggcggtgcgtgggttactgcgcagacaaatatcctccagcgcggcttgcgcccacgcgctgtagtgttcgggtttggcgccagcgtcagccagccgtttgctctgtcccacttcggcaatcagctcgcacaccgccgcaatcgcatcgcgatcgtccgatttcttattggttaacgcccgacctatttgactgaagcgctcgcggcaaaccatccggttaaagcccatgactgttggcagcagcatggcgttggcctggccgtgcggaatatgcagcgccgccccaggctggtgcgccatcgcatgacacagccccagaccggcgctggaaaaggccattcccgccatacaggaggccagcaacatattttcacgcgccgccagatcgtggccgtaacccacggctttcggcagcgatttgccaatcatcgctatcgcgccaatcgccaggctgtcggtaaacggcgtggcgttgagcgcgctgtaggcctcaatcgcatgcgtcaacgcatcgataccggtcatcgccgtcacgtttggcggaacgccttcggtcacggcagcatcaagaatcgccacgtccggcattagtgacgcgtgcgccagcacctgcttgcgcccgctgaccgcgtcgataatcaccgttacgttggtggtttcagaaccggttccggcggtggtcggcaccgcaatcagcggcagacgcgggcgtaatgtactgtgctcggtcatggcgctcagcgtctggtcagggttagtcaccagcagggcgaccgctttcgccgcgtccagcaccgaaccgccgccaaaggccactacgccgtcgcacgccgcctcacgcagttgcgccaccgccgcgcagacatcggtgatgcacggctcgccaggcggacacggccagaccgtcatcgccacgcccttcatcgccaggctgcgtgccagcggcgcggtcattcccgcctgatgcaggaagctgtcgaccatcacaaacagatggcttacgcctcgcgcttgcgcttcctgtccacaggcgccgagcgccccaagtccgcacagcgtgaccggcggtacgctgaacgttttcacccgttgcagattcagggtgtcgaatgcctgaaacagcgccgtctgtagttcagcttgcatagagtccctccgctttcgctctcccgctgttggctatcgccagcggggtcataaacaggctgtgctgcggcaaatgcacctgtaactccgggaaacgctggcgaaataacgcctccacgcccggctgcatacaggagccgcccgccagccataaatcagcaattccttgcccttcaatgtggcgagcaacgatttccgccatcttttcgtacaccggcttcactaccggccaaatctcctgcgcattgctgcgcttgtactgttccgcctcttccaggggaatacggcggttgcccgccagcgtcagggagatatggtgcccgccagtggcttcatcggcggagtaagtcaccttgccctgtttgacgatggcaatgccggtagtgccgccgccaatatccaccacgcctgcattatcaagcgccagcagatccgctaccgccgtcggttcatccagtacatggctgacttctaacccggcagactccagcacgttgatcgaaatacgcgggtcggtgcctggcggaaacgaggtcgccgcgtgggtaaagcggcagccgagctgctgttcaagggtgtcgagatggcggcgcacgagggtgacggcgccgaagaaatcccagacgatgccgtcacgcacaacgtcggcccagtcaaggcataccgccaccggctgggcgttgccgtcgaccaccatcgacaccacgtcgcaggtgcccaaatcgacgcccagccacagcggtgtatcgctggcggcgggcgtctggttacacagggccgccgctttttgcagtcttggggtgagccagagttgttcgtcgtgcgccatgagtcatcccttatacaatgcgaaacgcatccaccagcacgcatcgacgcagccgcacaaaggtacgcgcgctggtcaccccttcgccggttggcgtagtgatagtcatggtggtccagccttctccgcccaatccaagcccggcaatgcacggcccgtttttgacgaaaatgctggtgtcgatggcgttcgccatctggttcatgttgtcgatattgcgcgagtgcatcgccgccgtatggtggcaaccgccttcaagctgaaccgccagggcgatggcttcttcgacgttggcgacccgcaccaccggcagtaccggcatcatcatttcagtaacggcaaacggatggttggcgggcgtttccacaaacagcaggcgcgtttgatccgggacgttcaggccgatggctgcggcgatcttgcccgcgtcacgaccgacccagtcacggctgacggtgcctttgccgcgttcatcgatattcttcagcagcaccggctggagctgttcggcctgagcggcggtcagtttcaccgcgtgctgaccttccatcagacgcatcagctcgtcggcgacgctatccaccacaatcagcactttttcgtcggcacagatgatgttgttatcaaacgacgcgcctttgacgatggattgtgcagcgcgcggcaggtcggcggtctcatccaccaccaccgggggattgccggcaccggcggcgatcaggcgtttattagtatgtttacgcgccgcgtccaccaccgcttcgccgccagtcaccaccagcaggccaataccgggatatttgaacaaccgctgggcggtttcgatatccgggttcgccacggtgaccagcaaattttccggaccaccggcggcgaccaccgcctgattgaggagagtgattgcccgctgagagacctttttcgccgccggatgcggggcaaacacgacgctgttgcctgcggcaatcaggctgatggcgttattaatcaccgtcgccgccggattggtggacggcgtgaccgaggccaccacgccccacggtgcattttcaatcagcgtcaggccgttatcgccggtcagcacctgcggagataaacactcgacgcccggcgtgccgcgcgcctgcgccacgtttttggcaaatttatcgtcaacgcgtcccatgccggtttcgctgacggcaagttccgctaattctcgggcgtgtttttcgcccgcttcgcgaatggcatgaatggcaagctggcgcatcgccacgctcttcagcccctgctgggcccgttttgctgccgccactgcgtcatccagggaggcaaaaacgcccatctcatgaacagtactggccggctggctgctgtctttcattttcagcagtaccgctttcaccacctgttcaatatcctgttgattcatgatgttcaatcctatttatggaaaaccactttcccgccagccaccacttcatcgacgatgccaatgacgcacagatcgaccggtgataattcgctgcgatgcgcctggcgtgcggaactgccgctgaccagcagtacccactctccggttcccgccccgatactgtcgatagcgacggcacactgcccgtcggggttgccctgggcatcgatcatttccaccatcagcaatttgtcatgcgccagtccctgatggcggacggtacatacgatttgtcctgtgacgactgccagtttcatatccgcctccatggattgcccgttgggtcgtaggccttgaatctgcgcaccatcaggcaatggcgcgcattcatgccggatggcgacgctgcgcgtcttatccggcctaccatcaaatgttgctgtcgcctttgaagctgatcgggaacacttcttccagatcgccgtgcgggcgtggaatcacgtgtacggagaccaactcgccaatgcgctgcgccgcagcggcgccagcatcggttgcggctttgcacgccgccacatcgccacgcaccatggcagtacacaggccaccgccaatctgcttcacgccgaccagcttcacgcgcgcggcttttaccatcgcatcggaggcctcaatcagcgcaaccaggccccgggtttcaatcattcctaatgcttccatcgtgttttcctctcattaaaggggtccagaacgggaccgttcattcaaccagtgtgtgtaagctgcgttcgcggctcacgtcagcctggcgcggcacggctgccaccaacgccagttcgataatttcctgcacgctacagcctcgggagaggtcgtgaagcggcgcggcaagcccctgaattagcggcccaacagcgcgatagcctcccagacgctgagtgattttgtagccaatattgcccgcctccagcgacgggaaaatcatcacgttggcgcggccttgcagcgggctgtcaggcgctttttgcgcggcgacctccggcacgaaagcggcgtcaaactgcaattcaccgtccacaagcagttgcggcgcacgttcgcgaacgagctctgtcgcctgctgcacgttggcaacattggggtgacgggcgctgccgttgcttgaaaatgacagcatcgccacgcgcggctcttcgccggtaatggcccgccaggtgtcggcgctggcgagagcgatatccgccagctgcgccgccgtcggctgcggcactacgctgcaatcggcgaaccctaatgccggaccggcatactgcggcagcatcaggaaaatagacgacaatgttttgcacccgggttgcaggccaatcacccgcagccctgcgcgcagcacgttcgccgttgacgacaggttgcctgcgatacacacatcagcctcaccggcgctcaccatggcggcagcgaacatcagcggatcgctaagcttttccactgcgtccggcggcgttttttctccggcacgggcaagccagcgttgcgcaaaacgctggcgcatactcaggttgctgtgtgggtcgatgacctgaatgccatccatcgccatacgatgactcagggcaaactgacgcagcgcaaacggactggcgaccagaacggggcgagccagaccgtactgttgcaggtaatgcgccgctttcagcacgcgttcgtccagcgcatcaggaaagacgactctggcgggggcgcgtaccgccagttcgcgggcgcgttcaatgatcatggcttctctcccaaccgttgttgaatttgggcgaccgtcagcggatgtttcgccacgctcaaaatcatcatcacgtaaaccgtactggagagacggttcagcgcctgtaaaatgtccgggcgcaagacctcaaaactacgggtaataaacacttgtgcggcgagggtttctgtttcgcggactttggttcgcagcagattaagcagcgccgcatcgcgaccgtggctggcctccggcaccaggtgatcgtggtcgaggtagcgcagcggctggtgggaaaggcgatgcagctcatcctcgttcagtccgacgatagactgcgccgccagcggttcatctatagcgtcggcgcgcataatgttgcccagccgcgagcggatatcgaaaagccacggctgccagggttccgccagttcgatttgtagccacacggtcagcgcgatggcgctgtcgagcgcggcgcgaaagccgaggcgcgggtcgcttttggcgaccattttgtccgccgtcagatgggtcagcgtatcgggctttttcaccaccggctggcggcacagttcacagcaggcctgtgggtgcgtatcgctactggttaagccatgtaccggctgcggctgctgttcgtcatcatcgacaaacagccggccttgcggatccagaaacttaatgcgcagacggcgactttccagcagttcccgggccgagggcgtcagtcgtgcgtcagcgggcagatggatctccgatccttcgctgagcgtatgattcgctctgagccacgtttcggtgatgaaatcgttcatacggattgccagtttgcaggccaggcgacgtacagaaagcgcacggacgttggcgtgccaaattcaatgctggagcctttagggatgaacatcacatctccggctttggcaatcatggtttcgccttcatggcgtacgtgcagttcgccttccagcaccatgtcgatttcgtcgtagttcagcgtccacgggaaaaaggcgttgtcccactgcataaacccggcggccatgctgctaccatcctgctctgtaaccagatcggttaagccgacgcagtgcggttcggcgccgtcgaagcggccaaatttcacgctgctgccgtcaatgactttcacgccgcctttacccgtgacggaggtaaagctcggctgcatcgtccccagttccagcgactgcttttccttcagcactttttccatcaactgcgccaccaggctttcagtaaactgcccttccgggagctgcgcgatgatggcttcccgaatgcgctggctttcgcttttacacgcctgcgccgatgtggatgccggaacggactcgtcgcattcggtaatcgtgaagcccagtagttccgccacttcgcgagcctccggggtaataatgctggcgcgcagcactaccgacatcgcctgttcgccgcgggcgtgggccgcacgaatatcgttagctgtgataagttttttcacctgcctcttcctcctgttcactgagagccgccagataatccaccaactgccgcacgctttgcgggtcgtggccgttgagctcgaaaatcggctcccggaatccaatctcgcaaagcaactgccgcgtagcggcgacgtcggcatccggcatgtccgttttgctgataacggcgatatgtcgtttacgggttccaacatccaataacccggcaggtaagcgactttctttatcgtttgccgcgtggacataaatcagcgtgtccacatcctgcaacgtggtaattaaggcgtgataccaacggggatggctaaaatattcacccggcgtatcgatatcgccatgatcattaaattccacggcctgcgtttttctggcgagggaataatttccccgtaacgcgttaaaaagcgttgtttttccggcaccgaccgcgccgacaaaagcaatacgtttcattaccgccaccaattaactttttgttaactcacacagggtaaagtttaataatcgccccagcccgctgaccgtctgtaatagcgcttcttctactgcgccgacggtgccataaatcaccagcgcgccgctaaatctatcgagaaaaccgatgtgtacatccgcagccttcatcgctaaatcgccagcgatcatcgccgtttcccccggcgttaaagtcataatgccaatcgcgccagcatcgggaacgccgatctttttcgccagttcttcaccagggtgcgcaatgagatgcgccagcgtgacctgtttgcccggcacaaattcctgaataatgcgttctttattcattgctcaccgtctccactgaaactgccgtcatcgtggcaattttttgtcggagtaaataacaaaattcggcaaggtgatgtaaaaggtgaggtagatcactaagagaaagaaaataaaagtgacttctgtcgaaggtgttaacgataaatatcgtggtgcatcacattttcaggcgtcattctgaatttaagcctgttccgcaataaatactcaccgactattctttgtattactaccattgataaaaataatgcgtatcactcgatttgtgcatagtacagattcagtgaaataagtaggggtaagcgcaacaggttccagaatatccccacccgagcctttcatgccatggcgaagcccagcggcgcataaataaatatcctccggcatagccggaggtttttcagatgcgcctataaggctctcttaccagccgcgccctaacaggcgcatacgatctgacatttgcatcaaacttcgttacttacggcccgtaaacgggctgcccggatacgggatcgataattgctcacccattttatcctcttcaagctggtgctttatgtagtcctgtatcttcgccgtgttcttacccaccgtatcgacatagtaccctctgcaccagaactccctgttcctgtatttgaattttagatccccaaactgctcgtaaagcatcagactacttttacccttcagatatcccatgaaactcgacacactcatcttcggcgggatctccagaagcatgtgaatatgatctgcacaacattctgcttccagaattcgtacgtttttccattcacacaattttcttaatatgctgcctactgccctacgcttctctccatagaacgcttgtcttcggtatttgggcgcgaaaactatgtgatatttacagttccatcgggtgtgcgctaagctcttttcgtcccccattgggacccccttttgatttcttgttgaacttttgcagttgccagaccgcaagatgttttaacaaatcaaaaggggttttaataactggcttaaagctgaaagctttccggaacccccagcctagctgggggttttccatagacaaaaaagcgcaggagaacctgcgccagaagagagagtaatgcgttattaaagcggcgtggtttgcgcttcaactaccgctaacgccaccatattcacgatacggcgtacagaggcgatcggcgttaatacatgtaccggtttagacacgcccatcaggaccgggccgaccgtgacgccttcggaactggagacgcggagtaagttgtaactaatgcgagcggcttccatattcggcatcaccagaatattggcggctcccttcagcgggctatccggcatccggtcattacgaatactttccaccaacgccgcatcaccgtgcatctcaccgtcaatcatcagatcgggcgctcgttcgcgtacccgctcaagggtttcgcgcattttgctggcggacagcgaatttgaggaaccaaagttagagtgcgacaacagcgcgactttcggctcaataccaaagcggcgaacggtttccgccgccattacggcgatctccgccaactgttccggcgtgggatcttcgttaacataagtatcggcgataaaagtgttgccgcttggcagcagtaaggcgttcatcgcccctgccgtatgcacgccgtcacggtagccaaagacggctttcacgacgctgaaatgctcatggtagtcgccgatggtgccgcagatcatcgcatccgcttccccacgctgcaccatgatcgcgccaatggccgtatggttgccgatcatcgcacgctgcgcctgttcctgagttatcccgcgacgcttcatgatctggtaatactcgctccagtactctttgaagcgcggatcggattcattattcacgatctcgaaatcaacgcccgctttgatctgtagccccagtttctggatacgcatttcgatcacgctcggacgtccgatcaggatgggcttcgccagtcccagggttatcaactcctgggttgcgtgcagcacgcgcgcctcttccccttccggcagcactacgcgcttcggatctttgcgtgcctgcgagaagatcggcttcatgaacaggttggttttgtagacaaactcggtcagtttatcgatataggcatcaaagtcagcaatcgggcgcgtcgccacgccggaatccattgccgctttcgcgaccgccggagcgattttgacaattagacgcgggtcaaacggtttcggaataatgtattccggcccaaagctcaggtcctgatcgccataggccgaggccaccacttcgctctgttcggcgtgcgccagctcggcaatcgcacggaccgccgccagtttcatctcttcgttgatcgccgtcgcgccgacgtccagtgcgccgcggaagataaacgggaagcacaatacgttgttcacctggttcggatagtcggaacgaccggtacagatgatggcgtccggacgcacttctttcgccagcggcggcagaatttccggttccgggttggccagcgccagaatcattggcgcgcgggccattttcttcaccatctcctgagtcagcactttcgggcctgaacagccgaggaaaatatccgcgccgtcaatgacctcatccagcgtgcgcttgccgctgtcgtctaccgcataggccgctttggtctccgccatattcggctcacggcctttgtaaataacgcccttagagtcgcacaccacgatgttgtgcttttgcatccccaacgcgaccagcaggttcatacaagcgattgccgccgcccctgcgccggagacgaccatccgtacgtcggaaatatttttctctacgactcgcagaccattaagaatggcggccgtactgatgatcgccgttccgtgctgatcgtcatggaaaaccgggatgttcatgcgctcgcgcagtttctgttcaatatagaaacattccggcgctttaatgtcttcgaggttaatgccgccaaaggtcggctccagcgctgcgaccacattgataaatttgtccggatcaagctcatcgacttcaatgtcaaacacatcgatgccggcgaattttttaaacagaacgcctttgccttccatgaccggcttgccggccagcgcgccaatgttgcctaaccccagtaccgctgtaccgttggaaatgaccgcgacaaggttgccgcgcgcggtgtatttgtaggctgccagcggatctttttcgatttccaggcagggcgccgccacgcctggcgagtaagccaacgccagatcgcgttgggtggcaaggggcttagtcggagaaacctgaattttaccgggtaccggaaattcgtggaaatcaagggcgctttgttttaactgctcatccatcttgttgttcctttcacgtatcgttcaaaaagtgacgcggcctggtgcgccgcacattatcaccgtactgcgcaacacaaactttgaaggtctgcaaactatcacgacgcagcgcaagagtttgttatcaacttataacggtcatgttacctgcttataccagcaataccatgcctgtctgctatgctttttggttatgtagtgtatcaatctttcagaagtgtgaatcaacacactcatctaacactttacttttcaaggagtatttcctatgaaccagctagacggcatcaaacaattcactaccgtcgtcgccgatagcggcgacatcgagtccatccgccactaccagccgcaggatgccacgacaaatccctctttactgttaaaagccgccgggcttgagcagtatggtcatttgattgaggatgcgattgcctgggggaaaaaacacggcggtacgcaggaacagcaggttgcggcagccagcgataaactggcggttaattttggcgcggaaatactgaaaagtattcccggtcgcgtctccactgaagtcgacgcgcggttatcgttcgataaagaaaaaagtatcgagaaagcgcgccatctggtggatctctaccagcagcagggtgttgataaatcacgcattctgatcaagctcgccgcgacctgggaaggtatccgcgccgccgggcagctcgaaaaagagggtattaattgcaacctgacgttgttgttctcttttgcccaggcgcgcgcctgcgccgaagcgggcgtctatttgatctctccgttcgtgggccgaatttacgactggtatcaggcgcgtagtccgctggagccgtatgtcgtggaggaagatcccggcgtgaaatcggtacgcaatatctacgattactttaaacagcatcgctatgaaaccatcgtgatgggggcaagtttccgccgtactgagcaaatcctcgcgctaaccggctgcgatcgactgactatctcccctaacctgcttaaagagctgaaagaaaaagaagaaccggtgatccgtaaactggtgccttcctcgcagatgttccaccgtcctacgccaatgacggaagcggagttccgctgggaacataatcaggacgcgatggccgtagagaagctgtcggaaggtatccgtctttttgccgttgaccagcgcaaactggaagacctgcttgccgccaaactataaaccttgcatggagtgatttatgtcccgtaaagaccttgccaatgcgattcgtgcgctgagcatggatgccgttcaaaaagccaattccgggcaccccggcgcgccgatggggatggcggatatcgctgaagtgctatggaacgattttcttaaacataaccccaccgatccgacctggtatgaccgtgatcgttttatcctttccaacggtcacgcctccatgctgctctatagtctgctgcatttaaccgggtatgacctgccgctggaggagttaaaaaacttccgtcaactgcactctaaaacgccaggtcacccggagattggctatacgcccggcgttgaaaccaccaccggaccgctgggccaggggctggcgaatgccgtcgggctggcgattgccgagcgtacgttaggcgcacagttcaaccggccggaccatgagattgtcgaccactacacctatgtctttatgggcgacggctgtctgatggaggggatctcgcatgaggtgtgttcgctggctggtacgctgggactgggcaaactgatcggcttttacgatcacaacggcatctccattgatggcgaaaccgaaggctggtttaccgacgataccgccaaacgttttgaagcctaccactggcatgtcgtacatgacattgacgggcacgatccggaggcggtgaaaaaagccattctcgaagcccagagcgtaaaagataaaccttcgctaattatctgtcggacggtgataggttttggctcgccgaataaagccgggaaggaggagtcgcacggcgcggcgctgggcgaagaagaggtggcgctgacccgccagaagctgggatggcatcatccggcgtttgagatcccaaaagaaatttaccgcgcgtgggatggccgtgaaaaaggcgagaaagcgcagcagcagtggcaggaaaagtttgctgcttatgagaaggcttatcctgagctggccgcggagtttacccgccggatgagcggcggactgccggaggcatgggaatccgccacgcaaaaatttattaacgacttgcaggctaatccggccaaaatcgccacccgtaaagcatcgcaaaatacgctcaatgcctacggtcccctgttgccggaactgttgggcggatcggcagatctggcgccgagcaacctgactatctggaaaggttcgacctcgttgaaagaggatccggcaggtaattatatccactatggcgtgcgcgaattcggcatgaccgccattgctaacggcatcgcccaccacggcggctttgtaccgtataccgccacgtttctgatgtttgtcgaatatgcgcgtaacgcggcgcgtatggcggccttaatgaaagcccggcagattatggtctatacccacgactccatcggtttgggcgaagatggcccgacgcaccaggccgtggaacaactggcgagcctgcgcttaacgcctaacttcagcacctggcgtccctgcgatcaggttgaggcggcagtcggctggaagctggccattgaacgtcagcacgggccgacggcgctgattctctcgcggcagaatctggcgcaggtggaacgcacgccggaacaggtgaaagcgattgcccgcggcggttatattctgaaagatagcggcggcaagccggatatcattctgatcgctaccggatcggaaatggaaattaccctacaggcggcggaaaaattgactggcgaggggcataacgttcgcgtggtgtcgttgccttcaacggatattttcgatgcgcaggacgaggcatatcgcgaatcagtgctaccggcacacgtaaccgcccgcgtcgcggtggaggccggtatagccgactactggtataaatatgttggcctaaaaggcgcaattatcggcatgacgggatacggtgaatccgctccggctgacaaactgttcccgtattttggctttaccgtggaaaatattgtagaaaaagcccgccgggtgctaaacatcaaaggctaaggcgagcgttagcaacacagactttgcacagtctgcagacctgttctgtaggctgtgcaaaattacttcgtagactcaggcgcatctgactgcccgatgacgacctcatcaatggatttatggcacatcaggcaaaaggccttttttttatgcgcctgcaatgttgaatcccacgccgctgatccgccttctttattcactttttctcttatcgccgccagccgatctatttcataataagcgctcaggcagccacaatgggggcataatacggggccattatttattttcatactatttcctgctgtggtgaggctatcgggtaaagtaacaatcctaccgtaacgtagcaatctctataccataaatgaaacctcaataggtgtatccctattctgaaaaggggataacaaccaggattcaacgcgtgatccacagcgtaggccaggcatccggcccgtgccagctatcgcagctcggttcttcggcataacgcaccagacgaaaacgatcgccatcataacgccagcgcgtctggataccgcagtcggttaacccccgccctttcgccaacgtcaccagctcgcgcgttttctcgtcaaagaagacgttcatcaactccatgtcattactttcgacgccgcgattaaacggcagccgcaaacgtacggcgcgcgagacgagcgtttttttgcgtgaaactacccaggcgagatcaatagtgttataggcgccggcttcgcagttaacaatcaataacgctttatcatccgtcaacgcgctgacctgcgtctcgcgacgcagcgggtcaagcgaacaacgaatgccgtttacccgccatgctgcgtagtccagcagatcgtcgcgttcttcctcactcagcggtacgggcgttggattaatcacggcgatcccctttaatgccggtgccgggggcacgctgagcggcggttcgtttcctttttcaatccaggcggtttcgctgcccacacgtttttgttgcgcgtcgataaacagtaatgccgcttttaatcccgccagcgaaagcgtctgaacgccgttttttaaggtgatggcctgcgcatcctgaatcgtctgtaaaaatgcggtgatggtggcaggatcgccggtcatgagatgccagggcgacacgcgccagtgtggactgttgaacgaaagcggtttgccatccagcaataagcgaggcgcaattgcggcttctttagcgtcgggcggcgccaaaccgccgcggtcgatacgcagtaccgcatcggtacgcgccccggcgctgcggcttaatgtcatcaccagcccatgatgttcgccagtattgcgcgctacgcaaaaattttggttattgcaggtgacctgccagtcggaaaaagtccgttgcgctggcgcagcccacagtagctggaccggcaacaggccaaacagacaaaaaagaataacgcggtagcgcatgaacggaacaaccccagattcagaacaacacagctaaggcggtatcttccttgcgcgcctcagggttctcaatcagatttatcggattggtcttttttgtgtaaagaaatatatttcttttttttcagtccattagatgagacgtctgtaaatagttaagcaataacacggtcttaccgtcccgaatctcgcctgagcgcaccatttccagcgcccgggaaaacggtagttcaagcacctcaatctcttcgtcctccacgccgccgccgatgctggcacgctcgctatcatgatattcggcaatgaagaaatgaatcagctccgtgacgccgcctggcgacatataaagctcaaatatcttgcgtacctcaccaacgtcataccctgtctcttcaatggcctctttacggatacagacctccggctcgtcgttatcaagcaggccagcgcaggtttcaattaacataccgtcttgattaccgttgacccatgtcgccacgcgaaactggcgaaccagaaccacggtttttttagttgagttgtaaagcagaatggttgcgccattcccgcgatcgtaaacctcacgcttgtgacggataacctcgccattacgacgggtcaggtcataggtaatgttgcgcagagtaaaataattatcagaaagaattttatccttaataagcgtaatggtttgcgacatgctggctccagggtgtaaaaagagcattaatattacgccgtgaggtcggttttgtctgctgaagggttaatccttaatgccgactgaacggacgtacagccatatttttctgtcactgccatgaccatattctgcttctccgggccgcagagtccatgctcgcgatatgatttgacggccggagtgagactgagggaatcatcatgaaatttactctcgttgcgacggttctactgacgttttccctttcagcttttgccgttgagtatcctgtattgaccaccgcgagccctgatcaggtggggtttgatagccaaaaacttcaccgacttgatggctggattcaaaatcaaattgatgccggatatcccagcatcaatcttctggtgataaaagataatcatattgttctacaaaaagcctggggctatgccaaaaaatatgacggttccacgctgttagcccatcccattcgggcgaccactaacacgatgtatgatctggcttcaaacacaaaaatgtatgccactaacttcgcattgcaaaaactagtgtatgaaggaaaaatagatgtcaatgatttggtatcaaaatatatccccggctttaaggatatgcctggggataaaataaaaggcaaaaataaactccgcattattgatattcttcatcacgtcgcgggctttcctgccgacccacaatatcctaataaaaacgtcgccggtaaattattctcacagagtaaaagcactactctggagatgattaaaaagacaccgctggaatatcaacctgggtcgaagcatatctacagcgacgtggattatatgattcttggttttatcattgaatcgataacggcaatgccattagatcgctacgtcgaaaccaccatttataaaccgctcggattaaaacataccgtctttaacccgctgatgaaaggcttcacgccgccgcaaatcgccgcaacggaactacatggcaacacgcgtgacggcgtgattcatttccccaatattcgcaccaatacactatggggccaggtgcatgatgaaaaagcctggtactcaatgggcggcgtttcaggacacgccggactgttttctgacacccatgatatggctgtgttaatgcaagtcatgctcaatgggggcggctacggtaacgtgaagctattcgacgacaaaacggttgcgcagtttactcgccgctcgccagaagacgctacctttggtctggggtggcgcgttaacggcaacgcctcaatgacccccacgttcggggtattagccagtccgcaaacgtatggacataccggatggaccggaacgctgacgtctatcgatccggttaatcatatggcgattgtgattttaggtaacaggccgcactcgccggtagcaaatcctaaagtgaatccgaatgtttttgtcagtggattattacctgcggcgacgtatggctggattgttgaccagatatatggttccttaaaataaaaattaagagcctatctctgtaggcgttattggcgcagccagtttggacacggacagcgcgcaaaaaccggagcgtacacgtagtacgtgaggtttgactcgctacgctcgcccttcgggccgccgcaagcggcgttcaaaacgctaacgcgttttggcgagcactgcccaggaccaaaatggcaagtaaaatagccctaatgggataggctctaagaaggggttctgatagcgtcccttccttcaatttacactctattttcaatactaagattgtcctcatcaggcctgttaaacgtcgccccgacgggaaaatgtttatcgcagggcgttcagccctgcgagcgtcaacatttctgcaaacggagtaaggttagccaataagtttaagattttttatcactcaatcatttaaccgttccaggccttaaccggcctacaaatacgcttatttagctaaccagtcgagtatcccctgcgcagcatgtcggccttctgccatcgccgtcaccaccagatcggcgccgcgcaccgcatcgccgccggcgaaaattttcgggttggacgtctggtaacgaaactcgctctcgacgctggcggcaatacgtccccagttatccaccttcacgccatgcgattccagccacgacataccatgcggatgaaaaccaaacgccataatgaccgcatccgccggcatcacgaactcgctgtccggtacaggtaccgggcggcgtcgcccctgaccatccggttcgccaagccgcgtacgcaaaaagcgaataccgctggcgcgcccgtgcgtatccagcaccaactcaaccggctgaacgttaaattcaaagttcgcgccctcttcccgcgcgtttttcacctcttttttcgaccctggcatattggcctcatcgcggcgataagcgcaggtgacgttagcagcgccatgacgcagcgccgtacgtacgcagtccattgcggtgtcaccgccgcccagcacaaccacgttaaggcccgcagtatcaataaacggctcgtcaggcaacgccggaagccccatcacctgtttggtattggcgatgaggaatggcaacgcatcatatacccccggcgcatcttcattcggtaaatcagccttcatggaacgataggttccaaccccaacaaagacggcgtcataactctccagcagcgtctccagagaaatatctttccctacttcgcagttaagctcgaaacgaatccccatcgcgctgaagatttcccgacggcgcgccagcagagatttatccagtttgaaagccggaataccaaaggtgagtaaaccgccgatttccggatggcgatcgtagacggtggcgcttacgccatggcgcgccagcacgtcagcgcaggcaagacctgccggccccgcgccgataatcgccacgcgcttatcgctcttctgtacgtccgacaggtcgggacgccagcctttgctcagagcgcgatcggagatatagcgctcaatattgccgatggtaaccgcgccatactcatcgcggagtgtacacgcgccttcgcatagccgatcctgcggacagacgcgcccggtaatttccggcagacagttggtctggtgggaaagctctaccgccgcatcaatatcgccggctttcaccagttcgatccactggggaatatggttatgcagcggacaggtccattcgcagatactgtgttccccgcatgtgaggcagcgggacgcctcacgctccgcctgcgcggcgcgaaacggcagataaatttcctcaaaggtggttttacgcgcttcaatcgccagtttatccggttcgccgcgcggcggcgtcgcctgcatacgctcggctttgctgcttgctgccccactgtgttgtgtatccacggtatgccaggggcgaatctcctgccgggcggtacgcagccgtcgcgttttagccagacgggtcaacgagtcttcggtgaccagttgcagcgcatccgccgggcaattttccacacaggccggcccctgttcacgtccctgacacagatcgcatttatgcgcgctggctttgaactggtttggcgcgacgggcgtcaataccatctgcatggtgccgaatggacaggcgacgacgcaggatttacagccgatgcacttctgcgcattgacctgcacgctgtcgttaatatgcgcgatcgcgccgttcggacagctacgggcgcagggcgcatcttcgcaatggtgacatgtaaccgcgctgcgctggtgctgatgtttaatgacagtaattcggggctgatagcgctgtgacgtcaggacatgtcgctcatcattgtgagccattacgcaggcgacctcgcaggcatggcagcccagacactgctggctattggccataataaaacgattcatggcgtccttctgttttggttgcaaaaaccttattctttatatgagcattgttattaactgacgaaggcggggtcggcaatgttcatctgcccaggaagcacaactatctgtccagaacctgtggcagatcaatttatttcaaagcaaatgaaattgcggttcagctaaatgcggggagtaccagtgtgacggttaaacgcccggtctcggccagtctggctaaggcttttttctatattgtgctgttgtctattctgtccaccggcagcgcattactgacgctgaccagcagtttacgggatgccgaagcgatcaatatcgccggttcgctacgaatgcagagctatcggctgggttacgatctgcaaagccgtagcccgcagattaatgcgcatcgtcaacttttccagcacgcgctcaactcgccggtactgcaaaatctcaacgcctggtatgtgccgcaggcggtaaaaactcgctacgagcgcctgcacgccaactggctggagatgaatagccgcctacaggacggcgacattgcctggtatcagaccaatatcaacaattacgtcaatcaaattgatctcttcgttctggcgttacagcattacgccgagcgtaaagtcatgctggtcgtcgccatatcgctggcgggcggtatcggcatatttacgctggtcttttttaccctacgacgtattcgccagcaggtcgttcgcccgctgaatcaactggtcaccgccagtcagcgaattgaacatggtcagttcgccccgctgccgctggataccagcttacccaatgagctgggattgttggcgaaaacgtttagccagatgtcgagcgagctgcataaactttatcgttcgctggaagcctcggtggaagaaaaaacgcacgatctgcacgaagcgcaccgccgcctggaggtgttataccagtgctctcaggcgctgaataccagccaaatcgacgtccactgttttcgccatattttgcaaattgtccgtgaacatgacgccgcttggtatctggagttaaccgtgggcgataactggcggattagcgaaggcacgcaaagccccgacctgccgatgcaaatgctgccagtgacgatgcaggacacggtctatggcgaactccactggcaaagccccaacgttaatgcctctacgccgctgctgaacagcgtctccacgatgctggggcgtggtttgtactttaatcaggcgcaaaaacacttccagcaacttttgttaatggaagagcgcgcgacgattgcccgtgagctacacgattcgctggcgcaggtactttcttatttacgtattcagttaacgcttttgaagcgcgctattcctgaggataacgccggcgcgcaaagcatcatggcggatttttccagagcgctgaacgacgcctaccgtcagcttcgcgagctactcaccacgttccgtctgacgttacagcaggccgatttaccctccgcattgcatgagatgctggaagatttacagagtcagaccccggccaaactcacgttggattgccgtttacccacgctggcgctggatgcgcaaatgcaggtgcatttgttgcaaattgtgcgtgaagcggtcctgaacgccattaaacacgccaacgcgagcgaaatcgccgtgagctgcgtcaccgcgcctgacggcgatcataccgtttatattcgcgataatggcattggtatcggcgaaccgcatgagcctgccggacactatggtctgaatataatgcgtgagcgcgcggagcgccttggcggcacgctgaatttttcgcaaccctccggcggcggcacactggtcagtatcagttttcgctcctccaacaaggaagagagtcagttaacgtaaagaacggcaaatcgccggaaggccagatgtcaggctttccggcgttggcacaaaaagtatgctgtaaaagcgcatgataatttacattatctcctttatttctccacgtttggctcgtagcttgccgctacagtgaagcagttcaaatctataacgatatgtagaaacacgaggtttccctttaatggcgaatttttttatcgatcgccccatttttgcctgggtgctggctatcctgttgtgtctgacaggggcgttagccattttctctttacctgttgaacaatatcccgatctggcgccgcccaacgtacgtattaccgcgaattatccgggagcgtcggcgcaaacgctggaaaataccgtaacccaggttattgagcagaatatgacgggcctcgataatctgatgtacatgtcatcacaaagcagcggaaccggacaggcgaccatcaccctgagctttattgcgggaaccgatcctgatgaggcggttcagcaggtgcaaaaccagttacagtccgcgatgcgtaaactgccgcaggcggtacaggatcaaggcgtcacggtacgcaaaacgggcgataccaatattttgaccatcgctttcgtctctaccgacggttctatggacaagcaggatatcgccgactacgtcgccagtaatattcaggacccgctcagccgcgtcaacggcgtcggcgatattgacgcttatggttcacagtactctatgcgtatctggctcgatccggccaaattgaatagttttcagatgaccacgaaagacgtgaccgatgcaattgagtcgcagaatgcgcaaatcgccgtcgggcagcttggcggtacgccttcggtcgacaaacaggcgctgaacgccaccattaatgcgcagtcattgctgcaaacgccgcaacaatttcgcgatatcaccctgcgcgttaatcaggacggttccgaggtcaaactgggcgatgtcgccaccgtggagctgggggcggaaaagtatgactacctcagccgttttaacggcaatccggcttccggtcttggcgttaagctggcctccggcgcgaacgaaatggcgaccgcgaagctggtactggatcgcctcaacgagctggcgcagtacttccctcacggcctggaatacaagatcgcgtatgaaaccacctcctttgtcaaagcctcgattatcgatgtggtcaaaacgttgctggaagctatcgcgctggttttcctggtgatgtatctgttcctgcaaaactttcgcgccacgctcattccgacgatcgccgtgccggtagtattaatgggcaccttctccgtgctttacgcgtttggctacagtattaacacattaaccatgttcgcgatggtgctggcgatcgggctcctagtcgacgatgccatcgtggtggtggaaaacgtcgaacgtatcatgagcgaagaagggctcacgccgcgtgaagcgacgcgcaaatccatgggacaaatccagggggcgctggtcggtatcgcgatggtgctgtctgcggtattcgtgccgatggcgttctttggcggtaccaccggggcgatttatcgtcagttttctattaccattgtctcggcaatggtgctgtcggtgctggtcgccatgatcctgacgccggcgctgtgcgcaacgttattaaaaccgctgcacaaaggcgaacagcacgggcaacgcggatttttcggctggtttaaccgtaccttcaatcgtaatgccgaacgttatgagaaaggcgtagcgaaaattttgcatcgcagcctgcgctggattctgatttatgttctgttacttggcggaatggtgttcctgtttttgcgcctccccacctcctttctgccgcaggaagatcggggcatgttcactacgtctatccagctaccgagcggttctacgcaacagcagaccctgaaagtcgttgaaaaggttgaaaactattacttcacccatgagaaagacaacattatgtcggtcttctcgacggtaggttccggccctggcgggaatgggcaaaacgtcgcgcgcatgtttgttcgcttgaaagactgggacgcgcgcgatcccaccaccggctcctcgttcgccattattgagcgggcgacaaaagcatttaaccagattaaagaagctcgcgtcttcgccagcagcccgccggcaattagcggtctgggcagctccgccggttttgatatggaattacaggatcacgccggagcaggccatgacgcgctgatggccgcacgagatcaactcattgagctggccgggaaaaacagttccttgacccgcgtgcgccacaacggcctggacgacagcccgcaactgcaaattgatattgaccaacgaaaagcgcaggcgctgggcgtatcgattgacgatatcaacgacaccctgcaaacagcctggggatcgagctacgtcaacgactttatggaccggggccgcgtgaagaaggtctatgttcaggccgcagcgaaatatcgtatgttgccggatgatattaatctttggtatgtccgtaacaaagacggcggcatggtccccttctccgccttcgccacctcgcgctgggaaaccggatcgccgcgtctggaacgctataacggctattcggcggtagaaattgtcggagaggccgcgccgggggtcagtaccgggacggcaatggatgtcatggagtcgttggtgcatcagctaccgggcggttttggcctggaatggacagccatgtcttaccaggaacggctctccggcgcgcaggcgcccgcgctgtacgctatttcgctattagtcgtcttcctgtgtctggcggcattgtatgaaagctggtcggtgcccttctcggtgatgctggttgtgccgctcggggtcatcggcgcgctactcgctacctggatgcgcgggctggaaaacgatgtttacttccaggtggggctgttgaccgttatcggcctctcggcgaaaaacgcgattctgattgtggaattcgccaacgaaatgaatcagaagggacacgcgctgttagacgccacgctgtacgccagccgccaacgcctgcgaccgatactgatgacttcgctggcgtttatctttggcgtattgccgatggccaccagcaccggggcaggctcgggtagccaacatgctgtcggaaccggcgtgatggggggaatgatctcagcaaccgttctggctatcttctttgtacccctgtttttcgtgctgatacgtcgccgcttcccgctgaagccgcgcccgaaataagatcccggccagcctgatacgaggtgtcgggcacaaaaaaggcgactttcgttgagtcgccttttcttatcccctatgggagcgcggtgccttccaggcatttatttacgaagcatgacttcgataaaatctttccagttccccagttcacgttcaatcataatagcctctcttattattatgggtattctacgtagttagcggtatagagagaagttcatttaaccgattgttgcgatatcctctggttatgctgtctatgatattactatggcgctgtagccataaattttatgtgacttactgcaatatttagcaacattaataccttttctactactttatcaaattgggttaaaaaacaaacaattgcatatgcacaaaataggatttataccgcgaagtataaacaagccacatctggaacgttttggaatcattattcacattcactcaacaatgttatattgattgccgatcagcgctggataaataaccataaacggccacacttattatcccgcagacgatactattgattatttattcgaatttcgcgttaaaggattcaatatgattaccctctatggcattaagaattgcgacacgatcaaaaaagcgcgccattggctggaggaacatggcattgattatcgttttcacgattaccgtgtggatggcatagacctccctcttcttaatacctttattgccgaactcggctggcagcctttactgaatacgcgcggcacaacatggcgcaaactggatgaaggccaccgcagcgggattaccgatgccgactccgccgctgctctcatggttgaacagccggcaatcatcaaacgcccattgctctgcgcgcccgggaagcctatgctgcttggtttcagtgaatcccgttatcagcagttttttgatgaggtgtagtctatgtcgtgcccggttattgagctgacacagcaacttattcgtcgcccctccctgagtccggatgacgcaggctgtcaggcattaatgattgaacgcctgcgtaaaatcggttttaccattgagcatatggattttggcgacacgcaaaatttttgggcatggcgtgggcgtggcgaaacgctggcgttcgccgggcatactgacgtcgtaccggctggcgatgtcgatcgctggatcaatccgccgtttgagcctacgattcgcgacggaatgttgttcggtcgcggcgcggcggatatgaaaggttcactggcggccatggtggtggctgctgaacgttttgttgcgcagcatcctcatcaccggggccgcctcgcatttttgattacctctgatgaggaagccagcgcaaaaaatggcaccgtaaaggtggttgaagcgctgatggcccgtaacgagcggctggattactgtctggtcggcgaaccttccagtactgaaattgtgggcgatgtcgtcaaaaacgggcgtcgcggttctctcacctgtaacctcactatccatggcgttcaggggcacgtcgcctatccgcatctggcggataaccctgttcatcgcgccgcgccttttcttaatgaactggtcgctatcgagtgggatcggggcaatgactttttcccggccaccagtatgcaggtagccaatatccaggcaggcaccggcagcaataatgtcattcccggcgaactgttcgtgcagtttaacttccgtttcagcacggaactgaccgatgagatgatcaaagagcgggtacatgcgctgcttgaaaagcatcagctacgctataccgtagactggtggctttccgggcagccgttcctgaccgcacgcggcaagctggtggacgcggtggtaaacgccattgagcactataatgaaattaaaccgcaattactgacgacgggcggtacgtccgacggacgttttatcgcccgtatgggagcgcaggtggtagaactggggccggtgaacgccaccattcataaaattaatgaatgtgtgaatgccgccgatctccagctactggcccgtatgtatcaacgcattatggaacagctcgtcgcctgatgagcgttccggtaagaggaaataagcatggactggctggcaaaatattggtggattctggtattggtgtttctggtaggcgtactgctgaatgtgatcaaagatctcaaacgcatcgaccataagaaattccttgccaataaacctgagctgcccccgcatcgcgattttaacgataagtgggacgatgaagacgactggccgaagaaagatcagccgaaaaagtaaccggatatcatgccggacaggtatcgctatccggcatggtccccaccgccgggcattacgtcgcgcaaactctgcgttcgtccggcatccaacgcaattagcgcctgcgccgcctgcgcacgctgcaacgccagcagagctttacggcctgaaatgcgtagccgggcgcacagttcggcatcgctggctttttcttccagccgccctctcagcgccggtaatggcaatgcgctgtattgcagtaaacgatgcaggcaacctaacgatgtcagtagcggacggtgcgcgaacgcaaaaccgaccagctcacgccagtcttcatcattaagcgcctgttcgcgcaacgccgccagcggtatcgcctcgccgttccactgcgtcaggatatccgcatcgcggcgcaaacgccggtgttcctgctgcgccagccgttttcccgcgtcgctcagcggcaataacgccatcgccgtatagcaaccgctgctcgcctcccgatggttgcccatccgtaccagtacaaagccgcagcgttgccagaaacgccacagcttcggcgtatagccgaagctgacggaaagataatcacactgcgccgcctgcatgcacgcgcaggcaatcaactgctgaccgatgccttcacgctggcgagcggggtgcactgcgatacggcttacgcgacgcccaaccagcgtcgcggctaaagggtcgctaccgtgcgccgccagcgactgcgccaccagattcccacgcggccgccggaaaccgcaccatacagcctgactgagttctgcggataacccgccctcttcgaccagccagagggcgcccgccacacggttattcgccgtagcctgcaagaaatgctgtcctggcgcatccatcattcggcgcagatccagcggcgaagtacgatagtgcgcccccgacagtaactgatacacagccctcggcaacgcgggcgtattcacccaggcctgttggtaaaacgccgagatttctatcgcgccatgtggcgcctgcgcaaacgcttcatcgtcgaatatcagcgcctcgctgacgatattttccagcgggcattctggcgcccagcggacaggctgacgaagcgtgaagcggtgaagctgcggaaaacgggcgcaaaacttaagtaaaaaaccgcgtccggtgccttcgtagccctgaacggtggtggtgagtagtatgcggggaaagcgcgaaaccagttgcagcagcagcggcgtggggattgccgccgcctcgtcaaccaccagccagtcggctcttgccccgctcgccagcaacgcatccggcgccataaagcagaaccgctcaccggcaaacgctgccaggatatccgttgccgttttcgccggtgcggtcacgatagccgtgcccgccatccgggagatgaattgcccggccagcgccgatttgccgcgcccacggggggcaatcaccgtcgccacgccgggcggcatttcacgtaaacgcgataagatagccgcctgctccggctgcggctcgccggtggcgggtcgccagcattcacgggaaggataagatggccagcaaaacggctggcgctgtcgccaaagcagcgtttgcggatcgcgggagagagtccgtttaagatgctgtgcaaactgcggtgtggggataggctgcgcgcagtcgctccagcgcagtgaatcggtatcaggcctgctttcccacgtctcgtacggcggcatcagcagaagcagccagcttccggcctgcaaggtcccgctcagggcggcaaacgctgcggcgtcaaagccctgccaggcatcaaatatcgcatgacggaattcacggcccagcagcgtttgtaacgcctgtggcgtacagcacggctgggcgggcgcgtcaggcgcgacccacagccagtcaccgggcaatgcagcgcgtatcgcctcggcccgcttccggcaccacgccgcatcgccgctgatgaccagtaaacggcgaatgccttcctgtgtcatttgcgacgttaacgcctgtagcgcatcgatatcagacatccctgccccggtttatcaaaagtttttgccaaacgtattacattgcgccgggtcaccgctgtcaaatccacgcttaaaccagctgtagcgctgttctgaggtgccgtgagtaaaactatccggcacgacgcgcccctgcccctgttgctgtaagcgatcgtcgccgatagcctgtgcggcattgagcgcctcttccagatcgcccgcctccagtacgccttgctgctgcatactgtgtccccacacgccggcaaagcaatccgcctgtagctccatgcgcaccgaaaggcgattcacctccgtttgcgacgcgttttgctgcaactggcgtactttcggctcaatacctaacagtttttgtacgtggtggccgacttcgtgggcgatgacataaccctgggcaaaatcaccgtccgcgcccagcttatttttcatatcatcgtaaaatgagagatcgatataaacggtgccgtccgccgggcagtaaaacggccccatcacggactgacccgcaccacagccggtgcgcgtcataccacggtacatcaccagttttggctgctgatagccgcgccccattttttgaaagagttgaccccaggtatcttcggtcgtcgccagaatcaccgaggtaaattttgccgcttcatcatcattggggcttatcgaacgcgtcgactgctgctgcgaaaccggctggccggtcaacagaccggttaaatccaccccatagtaccctgcgaccaacaccaccaccaacagaatgatgccgccttttccgcgcggaagacgaaagcctgggccacccagcgaggggccgcctggccgattacgtctgtcctctacattgttgctttcacgacgcccttgccagcgcataatcacctcattctctctttgttatacagatgatcgtaggcggtcaggcgcaggattaccacaggtaaacgctatcagaatgaggaaaggatgataccggagagcggttgccccccggtcagaagcggaattaatctaatttcacgcccaggcgatgcgcgacggcttcataggcttcaatcagaccgcccaggctctggcggaagcggtctttgtccattttgtccagcgtctctttatcccacaggcggctaccgtccggcgaaaactcatcgcccagcaccacttcgcctttatacaggccaaactccagtttgaaatccaccaggataagacccgcgtcatcaaacagttttttcagtacgtcgttggctttgtaggttagctctttcatacgcgccagattttcctgacttacccaaccgaacgtttcacagtaggaactattcaccatcgggtcgtgcagcgcgtcgtttttcaggaacagatcgaatatcggcgggttaagctccatgccttcttccacgcccagacgcttgaccagcgacccagccgcacggttgcgcaccacacattcaaccggcaccatctccagcttcttcaccagacactcggtatcagacagcaaacgttccatctgggtcgggatgcccgcctcggccagtttggtcataatgaaatggttgaatttgttatttaccatgcccttgcgatcaaactgttcaatgcgcgcgccatcccctgctgacgtatcattgcggaattcgagcaccaacaggtccgggttttccgtgctgtatacggttttcgctttaccacgatacaactcagcttgcttttgcatctttaacactcctgggtgtgaattaacgataagtattcatttcctgctacgcctgccggagacgccggcctgtaattgtggtgcgaaatagcggttaaatcgcgtttttgtaccgacgcacacgtttgcgtatcttatcagaaaaaagggccggattgctccagccctgttaaattacttgttgaacgctgcctggaagacggcaaccagcgcgtcgttctggctttgcgtcagagtatgccccttaggatcgataaactgcaagctgctgcggttatctaaatcgccaacctgcaatttatagtctccggatgccaggcccgggtcgctagcgcccagatcccgccagtcgctgtcagacaacggtttgtacgttaccgccatgctgccctgagagcgagtgctgtcggtgactttcatgcccactttttccagcgcggccgggaggcgctgccacacgaggttgaacggaccgcgaacgaccagcataggtaaaccggtatcatcagcggcgctctgcacatccatcgttgcggcggaacggttctgcgcggcatttgccgcatccgtagcggtcttatccagaccggcggaaatgacgttcatcatttccgtgctatagcgctgcagcgacgccgcgtcagcgaccggcttgccagcctgttccagattaaccagttttaccgttaccgcctgctgatagccctgcggcttcaccgagatttgataacgtccacgatactgttcgtcttcatccaggcgattccagttcacccaatcggtcgtcagggtctggctggcatcgtcacgtttttcaatcggataatttttcgcctgaatcacgctgacgacttgcggccacagcgtgctgctccggccattttccaccaatagcgtagcggtatcgccagagaactgggtacgcgcgccgctcactaacgctaacggctgcgccggcggacggatatccaacgccttaccaaccgcgccgctccccttcgtgaccggaataacgtagtcgccggtcgttatcggcaggatcattcctgccggggcgtgaagttcagcaagcggcgcggcatccagataggattcatcgccgcttacctggcgcttgtagcgcgaatcggaactacaggcagcgagcagcaaaacaagcgaaacacccgcaaccttcgccaggcgcgacttttgtactgagtaagccatcaaatctccctaaactttacagcaggccagcatgctgaagcgctgctttgacgatgtcacgaccatggtccgtgataggcgtcattggcaggcgcagcgtgtcggtcgccacaagacccaatgccttacatgcccatttcaccgggataggattgggttcgacaaatagtttgttgtgtaacggcatcagacgctggttgatagcgcgcgcctcggcaaattgcccttccgccgccagtttgcacatgtcagccatctcgcgcgccgctacgttagccgtaacggaaatcacgccatgaccacccagttgcataaagtccagcgcagacgcgtcatcgccgctaagcagaataaaatcgtctgaaaccagctctttgatctggtgaacgcgggttaagttccctgtcgcctctttgatagcgataatattttttatttccgccagacgacccacggtttccggcaacatatcgcaaccggtacgggacggcacattatacagaatttgcggcaagtcagtgtgttccgcgatggctttgaaatgctggaacaaaccttcctgcgtggggcgattgtagtacggcgttaccgtcaggcagcctacaataccgctatcgttaaaacgctgcgtcaggctaatcgcttccgcggtcgcgtttgcgcccgtgccggcgataaccggaatacgtccgtcagccagttccagcgtcatcatcacgacatcgccatgttcatcatggcttagcgtggcagactcgccggtagtgccaaccgaaacaatcgccgaggtaccgttggcgacatgataatcaatgagttttttcaggcaagacctactgacgttacctttctcatccatcggcgtaacaagcgcgacaatacttcccgtgaacatgggccatcctctgtgcaaacaagtccctcaatggtacgtttggtatggcaataaaagcaagcgaccaaagccgttctgattgttgtatgcaggttttttttatggtttccttaagattacctcaccgctcaaaggaataactggtttgacaccgtcatcacaacactatttggttatcactgcgctgggcgccgacaggcccggtattgtgaataccattactcgccatgtcagcagttgcggctgtaatatcgaagacagccgactggcgatgctgggcgatgaattcacgtttattatgctgttgtccggcacgtggaacgcgattaccttgattgaatcgacattgccgttaaaaggcgcggagctggatctgctgattgtgatgaaacggacgtccgaccgcccccgcccggcaatgcccgcgacggtatgggttcaggttgaggtcgccgactccccgcatttaattgagcgattcaccgcgctgtttaatagtcatgaaatgaatattgcggagctggtctcccgcacgcagccggctgaaggtgataaagctgcgcaattatttattcaaatcaccgcacatagcccggcgtcgcaaaattccgcaaatattgagcaagcctttaaagcactatgtacagaactcaatgcgcaaggcagtataaacgtcgtcaattactcacaacatgatgaacaggatggagttaagtaatgaatccactgaaagccggtgatatcgcaccgaaatttagcttgccggatcaagacggggaacaagtaaatttgaccgacttccagggacagcgcgttctggtttatttctacccaaaagccatgacacccggctgtaccgtgcaggcctgcggcttacgcgataacatggacgagctcaaaaaagcaggcgtggacgtgctgggcatcagcaccgataaacctgaaaaactctcccgtttcgctgaaaaagagctgctgaactttacccttttgtccgatgaaaaccatcaggtgtgtgaacagttcggcgtctggggcgaaaagtcgtttatgggcaaaacgtatgacggcattcaccgcatcagctttttgattgacgctgatggtaagattgaacacgtctttaatgattttaaaaccagcaatcaccatgatgtggtgctgaactggctgaaagaaaacgcgtaaaagcctcaggccgcgctgatgtgcggcctggaaagggaatgcgccgtcaggcttgccgcgccagacgcccttctccggtcatcaccagatcggcatctttaaccgcctgctcaagctgtagcgtttccacgacaatctctacgccggcgcgtaattcagcattgagcaaccctaaaagcgcggcgcccattccgcctgccgcgccgggagcgttaatcacctcacgtcccgtagcctgataaatatgccggccgcagttttccagcgcctcgtccagggtgttcaccatttccgctgtcgcccctttttgtgggccaaaaatggccgatgcgccctgaggaccacacagcggattgttgacatcgcacgcctttaagctgattggcggtagcggaatcaatttctacaatacagttttccttcagcagcgagaattttgtaggttccgacaataaaaatgccgcaacacggtgcggcattaaaaaaaagagcggctttctaagcgcttgtccctcatcaggcgtgcgcaaaatggcggcagggcactatgatgtcgttcacgctttacaacttttgtactgaccgctcaggatgaggcatccgtcacctgaccatccggccaggcatggacaacggctttaatcagcgtcgccaatggaatggcgaaaaacaccccccagaaaccccacagaccgccgaaaatcaccactgacagaataatcaccagcggatgcaaattcaccgcttcggagaaaagtaccggtaccagcaaattgccatccagcgcctgaataatgagataaacggcaaaacagctccagaattccgtccccagaccaaactgaaacagcgcgacgcccaccaccggaattgtcaccacaaaggcgccgatataggggatcagaaccgaaaagcccaccagtaccgccagcagtagcgaatagttgaggccaaacagcaaaaaacccagccaggtcgctacgcccaccaccaccatctccagcacttttccgcggatatagttggtgatctgctgattcatctcattccacacctgccccgccagcccgcgattacgcggcagcacgcggcgcacggcattcagcatctgctctttatcttttaccaggaaaaagaccatcagcggcaccagcaccagatataccgccagcgtcagtagcccgactaacgaagccagcgaatacttcaccaccgaatcgcccatgttaagcatccgggtacgcatgttttccgccatcgcatcaataatgcccgcatccatcagcgccggatagcgtcgcggcaaggtcgcggcgaaatcggacagtttattcagcataccgggcatatcacgaatcaggtaaataccctgctgccaggcaatcggcatcaccacaaacgccattaataacagaatgccgacaaaaaggataaggacaatggaggctgcccagcgccgggaacagccaatcgcctgcaggcgcgccgtcggccactccagcaggtaggccagtacgatagcgaccagcagcggcgctaacaggccgctaaagaaaaagaggatgctaaaaccagccaccagaatgaccagcaaggcaatcgcctccgggtcgctgaagcgacggcgataccattgcattaacatttcgagcataaaacccttcccagaactcaactgcgggattgtgatgccgaattgtatcgaaatgtcacaaaaaagacttcgctttttatcgttgattcaggaaactaaaatagtgagtctgtgctcatcacagttacacttatgaagtgtcggagcgtggaacgatatttcacgacgttggtcaaagggctatctcaaaacaacaggatagaggttatgttcaggcagttgaaaaaaaacctggtggcaaccctcattgcagcattggctctcggtcaggtcgcgcccgcatttgccgaccctgccgacacgctgcccgatatgggaacctcggcaggaagcacgctttctatcggacaagagatgcaaatgggcgacttttatgtgcgccagctacgcggcagcgcgccgttaatcaacgatccgctgctggtgcaatacattaacgcgctgggtatgcgtctggtctcgcacgccgactccgtcaaaacgcccttccattttttcttgatcaataatgacgaaatcaacgccttcgcgttctttggcggcaatgtggtgctgcactcggcgctttttcgctacgcggataacgaaagccagctagcttcagtcatggcgcatgaaatctcccacgtgacgcagcgccacctggcgcgcgcgatggaagatcaaaagcgcagcgcgccgcttacctgggtgggcgcgctgggttccattttgctggccatggccagcccacaggccggtatggcggcgctaaccggtactctggcgggaacgcgccagggaatgataagtttcacccagcaaaatgagcaagaagccgaccgtattggtattcaggtactgcaacgcgccggatttgacccacaggcgatgccctctttcctcgaaaaactgctcgaccaggcgcgttactccacgcgcccgcctgaaattttgctcactcaccccttaccggaaagccgccttgcggatgcccgcaaccgtgccaaccagatgcgcccggtcgtggtgcaatcttccgccgacttttatttcgccaaagcgcgcgccctgggaatgtacaattccggacgtaaccagcttaccagcgacctgctggatcagtggtctaaaggcaacgtgcgtcagcaacatgcggcgcaatatggccgggcgttgcaggcgatggaagcgagcaagtacgatgaagcgcgtaaaacgttgcagccgctgttaagcgcggaaccgaacaatgcctggtatcttgacctcgccaccgatattgacctggggcagaaaagagccaacgacgcgattaatcgcctgaaaaatgcccgcgatctgcgcgttaatcctgtgctgcagttaaacctcgccaatgcgtacctccagggaggccagccgaaagcggcggaaaccattctgaatcgctacacctttagccataaagatgacggtaacggctgggatctgcttgctcaggccgaagccgcgctgaacaaccgcgatcaggagctggcggcgcgcgctgaaagttatgcgctggcgggacgactggatcaggcaatttcactgctcagtagcgccagcgcccaggcaaaactgggtagtcagcaacaggcgcgttacgatgcgcgtatcgaccagttgcgccagttacaggaacgcttcaagccatacacgaaaatgtaatcgccgtttattagccggatggcgtcacaaggagaactcatgaccgacacgattaaaatctaccataacccgcgctgctcgaagagccgcgacacgctgaacctgctgaaatctaacggcgtggaaccggaagtggtgctttatctggatacgcccgccgatgccgccaccgtgcgggaactgctgcgtatgttgggcatgtccagcgcgcgcgaactgatgcgccagaaagaagatctctataaaacgcttcacctggcggatagtgagctgagtgaagaggcgttaatccaggcgctggttgaacaccctaaactgatggagcgccccattgtggtggcaaatggtcaggcgcgcattggccgaccgcctgagcaggtgctggacatcctcggttaaccgttgaacgccgccgtcgcggcgtattacagtttcaggatctctttgacaaacgggatcgtcagttttcgctgggcagtgatcgacgcatgatcgagctgatccagcgtcataaacagcgtgcgcatttcgcgatcaagacgtttgagtaaaaaccgcccgacatcttccggcagttcaaacccccgtaaccgggcgcgcaactgtagcgcctgaagtttgtcttcatcggaaagaggctggagtttatagatttgcccccagtccagacgggaagcgagatcgggcaagcccagatttaactgtcttggcggacgatcgccggtgatcaataaccgcgtcttaccggactccagaatgcggttatagagatcaaagatcgccatctcccacagttcatcgccagcgacacactcaatgttatcaatacacaccagcgagaggtgttccataccgtcgagcacttccggcacgaaccaggtacgtttatcgagcgggacgtagcctaccgcatctccacgctgcgacagttcagcacaggcggcgtgcagtaaatggctgcggcccgcgccttcacgcgcccaaaggtagatatatccactatgttcctggcgcaacacgttttgtaacgcggccagtagagaggcgttatcccccggccagaaacttgcgaaagtttcgtcgtcaggaagataaagtggcaaagagagctgtgccggtgtgttcagagatacctcaacccaggatgacataaaatcgcgctgagtttaccacataattcccgtgagatagaaccgggcagcatcgctgcccggcaacccgttactgatgcgggggctccgcatcatttgcctccagtaccacttcttccggacgcaacaggctaatcagtttaaaaatcaggctcaggcaaatcccgacgatggtcgccagcgccatccctttcaattctgccgcgccgatatgcactttcgcgccgctcacgccgatgatcaaaatcaccgaggtgaggatcaggttttgcgctttgttgtagtcgactttcgattcgatcaagacgcgaatccccgacgcgccgataacgccgtacaacagcagcgagacgccgcccatcacgggtaacgggataatctgaatcgccgccgccagtttgccaacgcaggaaagcagaatggcgaaaatcgccgcgccgccgataacccaggtactgtaaacgcgggtgatcgccatgacgccaatattttccccataggtggtattcggcgtggagccgaagaaaccggaaatgatcgtcgacagtccgttagcgaacatcgagcggtgcaaaccgggatcgcgcactaaatcttttttgacgatattcgccgtcaccaccagatgaccgacatgctcggcgatcacgaccaacgccgcgggcagaatcgtcaggatcgcgaaccattcaaaacgcggcgtatagaaggtcggcagcgcaaaccagtgcgcctgggcaatcggcgtggtatcgaccacccccagcgcgaatgacagcgcatagcccgccagcacgccgatcaaaatcggaatgatcgccaggaaaccgcgaaacagtacggagccgaacaccgtcaccgccagcgtgaccatggagatgataattgttttcgtgtccggcgactgcccttgcgcaggcagtaatccggccatccccgccgcgacgccagccagctccagaccgatgacggcaacgattgcgcccattgccgcaggcgggaacatcacatccagccagccggtgcccgcttttttaacgatgaaagagaccagacagaacaacacgccgcacataataaaaccgcccagcgccacttcataacccagcggcaacaacagtaataccggggaaataaaggcaaagctcgatccgaggtaggcaggaattttacctttgcagataaagagatacagcaacgttccgataccgttaaacagcagcaccgtcgcgggattgatatgaaacagaactggcaccagcacggtcgcgccaaacatggcgaaaaggtgctgtaaactaagcgggattgtctgtaaaagcggcggtctttcactcaccccgatagcacggcgcgtcatagtgttttcctctaagtgtgtttgttatgagtggttttattcaaaaaaaagccgactcttaaagtcggcttttaattatttattcacttatttggtaccaaaaatcttatcgccggcatcgccaagccccggaataatgtatccgtgctcgttaagcccctgatcgatagaggcggtgtacagttcaacgtccgggtgcgctttttccagcgccgcaatgccttccggcgcggcgaccagcaccagcaccttaatgctgctacagcctgcttttttcagcaggtcgatggtcgcgatgacagaaccgccagtcgccagcatcgggtcgacgatcagcgccatgcgctcatcaatgttcgataccagtttctggaaataaggtactggctcaagcgtctcttcgttacggtacatcccgactacgctgatacgcgcgctcggtacattttccagaacgccttccatcatacccagacccgcgcgcagaatcggcacaacggtaatttttttacctttgatctggtcgatttccaccgggccattccagccttcgatggtgactttttccgtttccaggtcggctgtcgcttcatacgtcagcaggctgcctacttctgaggcgagttcacgaaagcgtttagtgctaatgtcgttttcacgcatcagacccagcttgtgtttgacgagtgggtgtttgacttccacgatcttcatactcttctcctatcctcagatgactggcaaccacaaaaaaaatcgccggattataccgcttttcctctctgacgcaacacaatgtatgcttgacctggatcaaccaaaagcgctgatagcggaaaagtgagtataaatcactcacgttgaaacaggcgataaaggctaacaaccgtttgaatattagcaattttaagggtgaatgacctgtcccgaccgcctgtcgtaaaccaagtgctggatatccttttcttttttaccaacagggaaattttcaagcagcgaccgaaaccatgcaaaaaaaatcgcccggataaccagggcgcagaccacgctcgcaaacgtttgctttccctgttagaattgcgccgaatttaacttttaccgcaagaaaaaacgtggggaaccaggcagtgaccgataagacctctcttagctataaagatgccggcgtcgatattgatgcgggtaacgctctggttgatcgaatcaaaggcgtagtgaagaaaactcgccgcccggaggttatgggcggtctgggcggtttcggtgcgctgtgcgcgttgccgcaaaaatatcgtgaaccggtactggtttccggcactgacggcgtaggtaccaaacttcgcctggcgatggacttaaagcgtcacgacgctatcggtattgatctggtggcaatgtgcgtaaacgatctggtcgttcagggcgcggaaccgctgtttttcctcgattactatgccacgggtaaactggatgtcgataccgccgccagcgtgatcaacggtattgccgaaggctgcctgcaatccggctgcgcgctggtcggcggcgagacggcggaaatgccgggcatgtatcacggcgaagattacgatgtggcgggtttctgcgtcggcgtagtcgaaaaatcagaaatcatcgacggctcccgggttgccgaaggcgacgtgctgattgcactcggctccagcggcccgcactcgaatggatattcgctggtgcggaaaattattgacgttagcggctgcgacccacaaaccactctgctggaagggaagccgctggccgatcatctgcttgaaccgacccgtatctacgtaaaatcggttctggaactgattgaaaacgtcgatgtacacgctatcgcccacctcaccggcgggggcttttgggaaaatattccgcgcgttctgccggagaatacccaggcggtaattaatgagtcgtcctggcagtggcccgccatctttacctggctgcaaaccgccggtaatgtcagccgacatgaaatgtaccgtacctttaactgcggcgtcggcatggtgattgcgctctccgctccggaagcggacaaagcgcttgctctgctaaacgagaaaggtgaaaacgcatggaaaatcggtatcatcaaagcctctgattccgaacagcgtgtggttattgaataatgaatattgtggtgctgatttccggcaatggaagcaatttacaggcgattatcgatgcctgcgaagcgaagaaaattaaaggcaccctcagggcagtattcagcaataaggccgacgcgttcggccttgaacgcgccagagaagccggtattccggcgcaagcgctgactgccgatcggtttgacagccgcgacgccttcgatcgcgagctgattcgcaagatagacgcgtatgcgcccgatgtggtcgtgctggccggttttatgcgtattctgagtccgatgtttgtcgcgcattactacgggcgtctgctgaacattcacccttccctgctaccaaaatatccggggttgcatacccatcgccaggcgctggaaaacggcgatgaggagcacggtacctcggtacatttcgtgacagacgaactcgacggcggcccggtcattctccaggcgaaggtgccggtttttgccaacgacagcgaagatgatatcaccgcacgcgtacagactcaggaacatgcgatttatccgctggtgattagctggtttgcgcaggggcgtctaaagatgcgcgataacgccgcctggctggacgggcgtcgtctgccgccgcaaggttatgcgtctgacgaataatatgtcatcggacaggactgcgtctgcttgccggatggcggcataaatgcctatccggcctactcttttcccttcctttatgctatcagtttattgtcatatttttctgacgctgttggacattaacgcgtaatgctcgccataattatcaggcagtgtcccgtgaataaaacggagtataggtagtaatgggtcaggaaaagctatatatcgagaaagaactgagctggttagcatttaacgaacgcgtgttacaggaagcagcggataaatccaacccgttgattgagcggatgcggttcctgggaatctattctaataacctcgacgagttctacaaagtgcgtttcgctgaactgaaacgacgtattattatcagcgaagaacagggttcaaattctcattcacgccatttgttaggcaaaattcagtcccgcgtgttgaaagcagaccaggagttcgacggcctgtacaacgaattactgctggaaatggcgcgtaatcaaatctttctgatcaacgagcgtcagctctcggtgaaccaacaaagctggttgcgccactattttaagcactatttgcgccagcatattaccccgattctcattaaccgggagacggatcttgttcagtttttaaaagatgattacacctatctggcggtggagattatccgtggcgacaccatcaactatgcgctgctggagataccgtccgacaaagtcccacgcttcgttaatctgccgccggagacaccgcgcagacgcaagccgatgatcctgctggataatattctgcgctactgcctggatgacatttttaaagggttcttcgactatgacgcgcttaatgcctattcgatgaaaatgacccgcgatgccgaatatgacctggtgcatgagatggaatccagtctgatggagctgatgtcttccagcctgaagcagcgcctgaccgctgagcctgtgcgctttgtctatcaacgcgatatgcccgccgcgctggtcgacgtactgcgggaaaaactgacgatctcccggtatgactcaatcgtacccggcgggcgctaccacaattttaaagactttattaattttccgaatgtcggtaaagccaacctggtcaataaaccgttaccgcggttacgccatctttggtttgataaagagaagtttcgtaacggtttcgacgcgattcgtgaacgtgatgtgctgctctattatccttatcacacctttgaacatgtgctggaactgctgcgtcaggcgtcgtttgacccaagcgtgctggcgatcaaaatcaatatttatcgcgtagcgaaagactcgcgcattattgactcgatgatccatgccgcccataacggcaaaaaagtcaccgtggtggtggagttgcaggcgcgcttcgatgaagaggcaaatattcactgggccaagcggttaaccgaagcgggcgtccatgttattttctctgcgcccgggctgaaaattcacgccaaactctttctcatctcacgaaaagagggtgatgacgtggtgcgttatgcgcatatcggcaccggtaacttcaacgaaaaaacagcgcggctgtataccgattattcgctgctgaccgccgatgcgcgcattaccaatgaagtgcgtcgggtctttaattttattgaaaacccctatcgcccggtcactttcgattatttgatggtttctccacaaaactcacggcgtctgctgtatgagatgatcgatcgtgaaatcgccaatgcccagcaaggcttaccgtcagggattaccttaaagcttaacaacctggttgataaagggttggtcgacaggctatacgccgcgtcgggttcgggcgtccaggtcaatctgctggtacgcggtatgtgttctcttattccgcaactggaaggcattagcgataatattcgtgcgattagcattgtggatcgctatctggaacacgatcgggtttatattttcgaaaacggcggtgataagcaagtttggctctcttcagctgactggatgacgcgtaatattgactaccgtatcgaagtcgctacgcctatcctcgacccgcggcttaaacaacgcgtcctggatatcattgacattctgtttagcgacacggtaaaagcgcgttttatcgataaagaactcagcaaccgctacgtaccgcgcggcaatcgccgtaaagtccaggcgcagctggcaatttatgactacatcaaatcactcgagcaaccagactaacgctatgccaatttacgataaatcccctcgtccgcaggagttcgctgcggtcgatctcggctcaaacagctttcatatggtcattgcccgcgtggttgacggcgcaatgcagattatcgggcgcttaaaacagcgcgtccatctggcggacgggctgggcgcagataacaaactcagcgaagaagccatggaacgggggcttagctgtctgtcgctgtttgctgaacgcttacaaggtttctccccttccagcgtctgtatcgtaggcacccatacgttacgtcaggcgcaaaatgccgctgattttctcaaacgcgcggaaaaggttattccctacccgatagagattatttccggtaacgaagaagcgcgcctgatttttatgggcgtagaacatacgcagccggaaaaaggccgcaagctggtgatcgatatcggcggcgggtcaacagagctggtcattggcgaaaacttcgaacccaggctggttgaaagccgtcgtatgggctgcgtgagcttcgcgcagctctactttcccggcggcgttatcaataaagaaaacttccagcgcgcccgaatggcggcggcgcaaaaactggaaaccttaacctggcagtatcgtattcagggttggaacgtagcgatgggcgcttccggtacgattaaggccgctcatgaagttctcctggcgctgggtgagaaagatggcttcattacgccggagcgcctcgataaactgaagtcagaagtgttgaagcaccgctcctttaatgcgctcagcctgccgggtctgtctgaagaacgaaaagcggtctttgtgccgggcctggcgattctgtgcggcgtttttgatgctctggctatccgcgagcttcgcctttccgacggcgcattgcgcgaaggcgtactgtatgaaatggaaggccgcttccgccatcaggatgttcgcagccgtaccgcaaaaagtctggccaatcaatacaacattgacagagaacaggccagacgcgtgctggaaaccaccatgcagatgtacgagcagtggcaggcccagcagccaaaactggcgcatccgcagcttgaagcgttgcttcgctgggcggcaatgctgcatgaggttggactgaatattaatcacagcggtttacatcgccattcggcttatattctgcaacacagcgatttgcccggctttaatcaggagcagcaaatgatgatggcgacgctggtgcgttaccatcgtaaagccataaaactggatgatatgccccgctttacgctgtttaagaaaaaacagtatctgccgttaattcagctacttcggctgggcgtattactgaacaaccagcggcaggcgaccaccacgccgccgacgctgcggctaacgaccgatgacagccactggacgttatgttttccgcatgactggttcagccagaatgcgctggtactgcttgatctggaaaaagaacagcagtactgggaagcggtaactggctggcgtctcaatattgaggaagaaagctcgccggagatcgccgcgtaaattgtgagccagacgccgcgccgcggcgtctgtctttactgaatctcagataatagctgcggctcgccaattaaatatccctgaagatagtcgatccccaacgagagcactacgcttcgtatttcttcgctctcgacatactccgcgacgacctgcatatttttcattcgcgctaaatgacaaatagaagccacaatctgataatcgagactgtttgacactatattgcgaataaaactgccatcaattttaagaatatcggcgtcgacgtttttcagccgcgcatagctggcgtagccagtaccgaaatcatcaatcgctatctgacagccaaactgctgtagctgtcccagcgtcaactgcgcctgctcagcattggtgagagagttgctttccgttacctcaaaaaccagttgccagggttcaacctgatattgcgtaagcagctgcttaacttctgcagggaaacgagcgcggcataccgatgttggcgacagattaatggcaaaacgatgcgcgggcatatattcccggctggccgccataaaccgcagcgtgttttcaatcacccaaagatcgatagcggaagacaatccaaactcatgcgccacgggtaaaaaattgtccgggttgataacgtcgccgttgtcatccctgagtcgcagtaagatttcatggtaaacgtccccacgaacaccgaaaataggctgcgccatcaggaaaaaatgatcgtgctccaacgcctgttgcaggcgattcatcatcgcaattctgcccttcaaatcgcgctgcaggtgcattgcgccgcgccgctgtaaatcctccggcgcgttagtcgtcaacgaaagatcggaactggtgcttaattcgcccaacagcagataaaggtggctaaccggagaacgcacgcagcaatagctcacgccgacaggcggctgtagcggcagtccatcccagataaaccgaaactgcttaatatgtttatccagcgcttcaatacgctgctgatgcgcctctgtattaagacgcagcaccaggtcgtgccctgacatctggtagacgcactcatttgaggccagcatcggcgtaatccagtgagagagcttttgcttatactggatgcgtagcatgacgccataatttttacccaatagctccaggcccggcacgtgtaaaaaacagatcgtagaccagggcgcattttggagcgcgcggtttaacgcacgtaaattgggaagatgtacaaccgggtcaagataggccagccgccgtgcgcgaccactcactacgcgctgacgcgtggccagtacagacatataattaacaataaaagaaaaaaccagatagctcgaagaggtaatcgctaattgcgtatcataacctgaataccagggcatataacgctgataataatgaatcgacgtaattagcacgacggcccagataattgaaataaacttatagccatagcgcatcgcgccccacagcatgaccggcaataataacgaaagcgtatagttggtactaaatattgaactattatcagtcaatggcatacacagtataaacattagtgtagtcaatacggccagccaaataacgatctcttttttagtggccttgctatcaatctgtagctttaattgctgataatacccccgtaggtgcagcggattgcgaagagtacgaataataaaatagcacaatggcacgccgacaaggttaccgaccagtaacgcctggtaattaatcagcgtgttgatattaaagggcattacccccatcaggctggctttgctttcgtacatgccaacaaaagcggcaaactggtagatgaccagaaataatgttgctgaacaaaatacctgccagaatattcgttgaaacagcaggtgggcgtcgccgtgggaaacattgtttcgccggggggaaaagacacgatagccgccccagcttagcacgatagtaatgataaagtgcatcgtcacggaaagggtttcatacagccctgtctgcgggtatctgcgccagaagatagcaagcacaatgcccggcagtgctgcccagccgaaaaagagcatcaggctaagcataaaagctaacggcaggtaaaaaagaaccacatttccagtgctggtaagcgcataagtatttgcgctacttaaaacaggcagtaaaatcgaagggagaatgagcggtagtccccaccatttatctctgatatttatataagttttatttagtttcatagatgctcagcagaaccccccaatcccaaaggggcgttaacagacaggcatcccacctgactttaaattgatgatgagatatacatcacacgatagtcatcgattgtaattattaaacaaaagtaacatttgatttaagtcaattattacctttctcctgcagcctttattcgcctttttattctttgttatcattaatttattattaatgtaaatactaaaattatcttccataacaatataagataaatcaactgacgcaattttacattaagaggaattgaccatcggttcgcagtatgccttaatgtagagtgaacgcaggcttgttacgttcttcgccttgataatacccttgaagaacccagcctgatcccgcccatatcgctgggccaacgttaaggaaccctttgtgagtcaggccaacagtatgcgaaaacgacatcgatttaacactcgcatgacccgtatcgtactgcttatcagttttctcttcttctttggacgtttcgtctactcttctatcggcgcctggcagcaccatcaggataaaaaagaagcgcaacagtcatcgctttctgtcaccacgccgggacaacgttaagctgttatccgttaaaaagcccgcgcaagaaaaagaagctttagcgttaacgcaaaaagacaatcccactcaatgggttcaggccatgatcagacgcttaaagagcaaccgcgggatatcctgcctgggtgataagatcacatgcgcggttactaagattccctcgaccgaatacaaaacccgatagccttcagcgtggttaaactcccggtagctggcacagccaattttcagcagttcagggcaaccagttctacctacgaggggtaaacctcgtgggacaactccagtaacattaattgcttctaagtacatcagtaattggttgaactataaactgccacctgggatcagattaccaacgttgacaggcaaaactatcaactcattacagctaagctcaacgaataatttaggtcgtttcgttggtcgtaatgtaccctggctcggttgggttatgacattcactacgatttatgatatccagcgtaatattaaagatacatttaatcgtgtggcggttcctaaagatcgcattaagtggacgtacttctaatgagagatattgagaaagaaattatcgattttatcgatcaggaatataacactaaaaagtactttctctgtgggccaaagcgaatcatcacgcttgataccagtattagggatgatcttaaactcgtttttgaagatagtgaagaacttctacaaaagtacttcaagcgttggaatgtagattcagaaggatttgacatactcaactatctgaatccagagtactttggaagtaaagagcctgatccgcgtaagccactaacggttggtatgctcgttgaaagtgctaaagctgggcgttggttatatagttgaagaataaagttactatattttaaataccccttatttgggctgaatcgccacggataacctggacacttctgagtcgttggtagatctttttctttatccgttcacgcttcagtagctggaaaaagctttctgcaaccgcattgtcatgacagttgccacaacggctcatactgccctccagtccgtgcaatttcagccattcatagcgggtgtactgactaccctgatcagactgaaccagcacctgtttttggggatgacgtcgccacacggccatcagaagcgcattcagaacaatatcttttgtcattcgtggttgcattgaccaaccgataactttgcacgagaacaaatcaacgaccacggcaagatacaaccaaccttcgtgggttcgtaattacgtcaaatttgccgtcaggaactgtgcgccacatagaaaattcatgaatgcacataaataaaaaccctctgtaaaaacagagggttaaattcacctttacctgttcatgaaaacacaggaaggattatcggcttattcccactcaatggtagccggcggtttaccgctgatgtcatacaccacacgggaaatcccgttgacttcattgatgatgcggttggaaacgcgaccgaggaagtcatacggcaggtgcgcccagtgtgcggtcataaagtcgatggtttcgacggcacgcagagagacaacccagtcatacttacgaccatcgcccataacgccaacggaacgaaccggcaggaagacggtaaacgcctgactgactttgtcgtacagatccgctttgcgcagctcttcaatgaagatagcgtcagcacggcgcagcaggtcgcagtactctttcttcacttcacccagaacacgaacgccgaggcccggccccgggaacggatggcgatacagcatgtcatacggcaggcccagctccagaccaatcttacgcacttcgtctttgaacagctctttcagcggttcaaccagccccatcttcatctctttcggcaagccgccgacattgtggtgagatttgatgacgtgcgctttaccggttgcagacgccgcagattcgataacgtcagggtaaatggtgccttgcgccagccacttcacgtcttccagtttgagcgcttcttcgtcgaacacttctacaaaaacacgaccgatgatcttacgcttggcttccggatcgttctcgccagccagcgcggacaggaagcgctcttctgccggtacgtgaacgatattcaggccaaaatggtcgccaaacatgtccatcacctgctcggcttcgttgagacgcagcaggccgttgtcgacgaatacacaggtcagatttttaccgatcgcgcggtgcagcagcattgcggtgacggaagaatccacgccaccagagaggccgaggatcactttgtcgtcgcccacctgctcgcgaatgcgcgccacggcgtcgtcgatgatcttcgccggcgtccacaacgcttcacactggcagatatcgcgtacaaaacgctccagcatgcgcataccctggcgggtgtgagtcacttccgggtggaactgtacaccgtagaagcgtttttcttcgttggccataatggcgaacgggcagctctcggtgctggcgacggtcacgaagtcggacggaatcgccgtcactttatcgccgtggctcatccacacgtccagcagcggtttgccgtctgcggtcagggaatcttcaataccgcgaaccagcgcgctgtcggtcaacacttcgacctgcgcataaccaaattcacgctcattagaaccttctacatgaccgccaagctgcatcgccatggtctgcataccatagcaaacgccaaataccggcacgcctgcttcaaagacatactgcagcgcgcgcgggctgttttcttcggtggtgctttccgggccgccggaaagaataatgccgcttgggttgaagtcacgaatttgtgcttctgtcacatcccacgcccacagttcacagtaaacacccagctcacgcacgcggcgcgcaaccagttgagtgtactgagaaccgaagtccagaatgaggatgcgatgcttatgaatgttttccgtcattgacgcttattccgaggcaagtgaaacagattaaataaatcgcccgacacgaaggtcgggcgaagaaaatcaggagcccagacggtagttcggggactctttggtgatggtcacgtcgtgaacgtggctttcctgaatgcccgcaccgctgatacgcacaaactccgctttagtacgcagttcgtcgatggtagcacaaccggtcagccccatacaggagcgcaggccgcccatctgctggtgaatgatctctttcaggcgacctttataggctacgcgaccttcgataccttccggcaccagtttgtcagcggcgttgtcgctctggaagtaacggtcggaggaacctttggacatcgcacccagcgagcccatgccgcggtaagatttgtaagaacggccctggtagagttcgatttcgcccggggattcttccgtacccgccagcatggaacccaccattaccgcgcttgcacctgcggcaatcgctttggctatgtcgccggagaaacggataccgccgtcagcgataaccggaataccggtaccttccagcgcttcaactgcgtcagaaacagcggtgatctgcggaacgcccacgccagtcacgatacgagtggtacagatggaacccgggccaataccgactttcaccgcgctgcaaccggcttccgccagtgcgcgagcgcctgcgcctgtcgcgacgttgccgccgatgatttgcaggtcaggatatttagcacgggtttcacggatacgttgcaacacgccttctgaatgaccgtgagaggagtcgatcagcagtacgtcaacgcctgccgccaccagcgcgtcaacgcgctcttcgttgcccgcgcctgcgccgaccgccgcgccgacacgtaaacggccctgctcatctttgcaggagtttggtttacgttccgctttctggaaatcttttacggtaatcatgccaagcagatggaagttatcatcaacgaccagcgctttttctacgcgtttttcgtgcatttttgccagcacgacttcacgggcttcgccttcacgaacggtcaccagacgctctttcggcgtcatgtaaacgctaaccggctggttcaggtcagtcacaaaacgcacgtcacgaccggtgatgatacccaccagctcgttatcttcagtcaccaccggatagcccgcaaaaccgttacgctcggtcagggctttcacttcatgcaacgtggtggttggcaggacggtctgcgggtcggtcactacgccggactcgtgtttcttcacgcggcgaacttcttccgcctggcgctcaatggacatgtttttgtggataaaaccaatgccgccttcctgggccagggcaattgccaggcgcgcttccgtcacggtgtccatcgccgcagaaagcataggaatattcagacgaatagttttcgtcaactgcgtgctgagatcggcagtattcggcaaaacggtggagtgagcgggaacaaggaggacgtcgtcaaacgtcagggcttctttagcgatacgtagcatgggcaatatctcacctgggaggttaataaatattgccgcggcattatacagaacgtaatcggttgcatctacatttttttgcaaatagtgcttgcgatcccccgtgagcaggttactatcgattgaataacctgctgatttagaatttgatcccgctcacatgttatcctctcaaacttcctcaatttttaccgtaagccgccttaaccagacggttcgtctgctgttagaacaggagatgggacaggtatggatcagcggcgagatttctaatttcacgcagcctgcgtcgggccactggtactttacgctcaaagacgataccgctcaggtgcgctgtgcgatgttccgtaacagcaatcgccgggtgacgttccgcccgcagcacgggcagcaggtgctggtacgcgccaacattacgctgtacgagccgcgcggcgattatcaaatcatcgccgaaagtatgcagcccgcgggcgaaggcttgttgcagcagaaatatgagcagctaaaagccaaactgcaggccgaaggcttgttcgatcagcagcataaacagccgttgccctccccggcccactgcgttggggtgatcacttcgaaaaccggcgcggcgctgcacgatattctccacgtgctaaagcgtcgtgacccatccctgcccgttattatctatccaaccgcagtccagggcgacgacgcgccggggcagatcgttcgtgctatcgaactggcgaacgcgcgcggcgaatgtgatgtactgatcgtcgggcgcggcggcggttcgctggaagatttgtggagttttaacgacgaacgcgtggcgcgggcgatttttgccagccgcattccggtggtcagcgccgtcggtcacgaaacggacgtcacgatagctgattttgtcgccgacctgcgcgcgcctacgccatcagcagcggcagaaattgtcagccgtaaccagcaggagttgttgcgtcagatccagtccgcccagcagcgtctgggcatggcgatggactactacctcgccaatcgcagccgccgtttcacgcagatttttcaccgtctgcaacagcaacatccgcaactgcgtctggcccgtcagcaaaccgcgctggaacgtctacgccaacggatgggatttgcgcttgaggccaggattaagcaggccaatcaacgccaacagtgcgtaagtcaacgcctgagccagcaaaatccgcagccgcgcattcaccgcgcgcagtcgcgcatccaacagcttgaatatcgtctgacggagaatatccgctcacggttaagcgaacagcgcgagcgttttggcaacgcggtcacgcatctggaagcggtcagcccgttagccacgctggcgcgcggctatacggtttcgacgacaacggacggcaaggtgctgaaaaagatcaaacaggtcaaagcaggcgatatcatgaccacgagactggaggacggctggcttgaaagtgaagtcaaatccgtcacgccgggcacgtaatccaacactcccccaccctttgcagcgcgatgttgggtttcgacttcgcctcagccaacctacgcgccacgtcggataaggtgtagccataatctgacgatcaaccggtttgtcattcgcctcaaaaccgggcagggaacacccgcccggttttgtctaacttaccagttatagcgcagattgaggctaccgttcagatcgccaaagtcattgctgccagtctgcccggcaacctgagcgcgaacgctccactgcttatcgatatctgcctgcagacccactttcagctccgcacggttagccggaagatcctgtttcaccgtagcatcatcaaacgataccgacacatcatcgctggtgtgcagccagttagcttcagcaaacggctggataaccgtacggctgcctttgtacagcttgccgtcaacacgcagacccagacgcgttgtccaactgtcgccatcctgaccatcaatccgggtgccgtagttatccttcacgctatccgctgagtaattctgccagacaacctgcgcctgcggcgtcagactgacagtattaccgttgctaagcgcaatatcgtagcgataaccagtttccagcgagacggcgttagcggttgaatcataagattcagatcccgcatcaccgctctctacgctgttgttgtagaaaccatattggtaccagctgtcgacatacgcgccgctatgcgtttgggcatcggcaaaccaggtggcatagacgccaaggttgtagccgtctacgttgccgctactggtgaactggctaccgtctgcgccacggttaccggtgctgtcggtatcggcgttgatgtagctcgccatgacgccaacggtaacgctctgctggccgttaccccaggccagaatgtcgccgcctaactggaactgggagtagttgctgtccatatcgatattgccgctgacagcctcggattccgctttacccgctttgaagcgcgcccatacgctgccatcggcattacgatactggctgccctcgcggtcatagagggtctgcatttgcaggttgcgcgccatccactggttgcccatgtacgcgccgatatccgcacggtactgcggtgcgacatcgccgccgtggtccggaggcgtgacatcgccgccgtcgccgccgtcgtccggaggcgtgacattaccgccatcgccgccgtcgtccggaggcgtgacattaccgccatcgtcaccgccatccgaaggcgtgtcatcaccgccgctgtcgtcatcatcagactgtgcttttgacgccagataccagtcgttgtcactttcattccagtacagacggtaggtatacagaccggcgttaacctcattttttagctcaaacgcatcgctggtcgatacgccgccaacatccaccacttcgataccgttagtggtctgtgctccatcgccgatgccgttgatgtacagatcggtggtgccggaagcatcgccggtaatgaccaacttatcggttgccgaatcatcgtcgcccaggacggtattcaggtaaagcgagccgccgttgccggtgtaattgccatcgacataaagcgtattgccaggcgtgctggagctgctaccactggtcattgtccccatgttgatcagatcgccattgagggtgaagatagcgcctgtttcctcgctgttgccgaagaccagcgtcccttcgttggtcaccttaccgttaacggtcgtaccattgctgccgccgaaggtcgccccggaggcgacgttcaccgcctgctggctgcccatctcgccaatcgagccgtctccggacagccatagcgtgccttcctgtacgttggtatcgccgctataggtgttcgcgccgctcagcgtcagtttacccgcgcccagtttggtcagcgatttaccgtcccagtcgccgttgccggttttatcgcccagtacgctggtgacttcaaaactgtcgcctgcgcccagggtaaacgtgccgtgtgctggcgtcgctgacgtggcggtcgcattccagctcagcccttcggtaagcagatattctgacgcatcttcaggattgattgtcccggttacggtcagatagtccggcttgtcagtgaggttcatcgtcaggctggtaaagtcgccgctgatatcgctggtcatatccatcagtttaaaggactggaactccgcgtcggaggcgcgcgcttgcaggctggcgtcgctgacgaccaaatcgccgccaagcgtggcgctgctgccggtaatcagcggttgcactgagtcactattcagctcaacgttcagcgtactgccatcttgctgaattaacgcgctgtcgccgagatccaacgaggtgccgagcgccagttgggtcgtcgcgccgctatgagtggtgatgccgcccaccgcgctgacttcaccgtctgcgtccagcaccagcgtggcattattgtctaccagaccggtgcccagcgccgtcgtactggcggcgaccagcgtaccttcattgatggtggtgccgccgctgtagtcgttgtcgccagagaggatcagcgtgcctgcgccttctttggtcagcgatttaccgtcccatctgctacccggatccagcgtatcgtcaacgtctgtcagtgtagccgcaacgttaaagctgccgtcagggtcgctcagggtaaaggtgccgtgggcgtcggtagtggcgttgtctctgtccgcataccaggagagggaggccgtcagatcatagtgggtgttgtctgcttcatcgacttttccgtcgatagtcaggaagtcaacatcttctctattcattcccgcgacggtcagatcgtcgaaatcggtcgtaatggcgctgtcgctgccaatcagcgtgtaggtgtatgcctcaggcgtccagctgtctgtaacgctgccaatgccggtaacattcagcgtgccgcccagcgcgacgctgtcggcggtaatcacggcgtcgtcggtggccgcgccgaggtcaatacttagcgtactgccgtcttcctgggtgaactggcccgcgtcaagggtgctgcccgctgccagcgcggtagtggcgccgctatgggtggtgacgttcgcaagctcaaatgcgccgttggcatccagtatcagcgtaccgctgttgtcgatattgccgctgcccagcgcgttgacgttggcggcaatcagcgtgccgtcagtgatagtggtggcgccggaatagctgttgtcgccgcctaacgtcagctcgccggtaccggttttgaccagcgaaccgctgccggaaagcgtattttccagctcgccctcaccgacctgaagcacaccgctgttggcaacagctccggtacccagcgaatccgcatggtcagccgtcagcgtaccgccgataatggtggtgccgccggagtaactgttatcgccgcttaacgtcagttcgcccgtaccggttttgaccagcgaaccgctgccggaaagcgtattttccagctcgccctcgccgacctgaagcacaccgctgttggcaacagctccggtacccagcgaatccgcatggtcagccgtcagcgtaccgccgataatggtggtgccgccggagtaactgttatcgccgcttaacgtcagttcgcccgtaccggttttgaccagcgaaccgctgccggaaagcgtattttccagctcgccctcgccgacctgaagcacgccgctgttggcaacagctccggtacccagcgaatccgcatggtcagccgtcagcgtaccgccgataatggtggtgccgccggagtaatcgttgccgccgcttaacgtcagctcgccggtaccggttttcaccagcgaaccgctgccggaaagcgtattttccagatcgccttcgcccaccttaagcacgccgctgttatcgatatcgccgctgcccagcgaatccgcatggtcagccgtcagcgtaccgccggtaatggtggtgccgccggagtaagtgttgtcgccgcttagcgtcagctcgcctgtgccggttttcaccagcgagccgctgccggaaaggatgttttccagctcgccttcgcccaccttaagcacgccgctgttgtcgatatcgccgctgcccagcgaatccgcatggtcagccgtcagcgtaccgccggaaatagtggtgccgccgctgtagttgttatcgccggtcacgatcagctcatcgctaccgcttttgacaatttggccctcgccggtcacgttgttatccagcgtgccctggctcagcgcaagcgttgcgctttctgcaatcgtcacatcgccagtgccgagcgcggcggcgtctttggcggccagaatgccgccgtcaatttcagtatcgccgtagtcgttgccggtgttgctgaggatcagcgtgccgtcgccttgtttggttagcttgctgccgttccagttggaggtcgccgtggtttcgtccagttcgctggtgacggtaaaggtactgcctgcatcaacggtaaaagtgccatgcgcagcgcgcgcagaatttgcgcccgcgtaccaactcaagcccgtagacaactcgtagttggtattatcattcgcatcaacgcccgcgttgatcgtcagataatccggcatagcggaggtgtcagcatccagtgttacgctgtcaaaatcggtagtgattgcagtttgcgaatcaatcagcgtgatcgatccaaagtgttcgtcggtttcgggcgcgacaaaggtggccgttgagctaaggttcagcgtcccgtccagcgtgacgttggcggctttgataattggcgcgctgttggcggtatccagcgtcgcgtttatctggctgccgtcctgcaaggtcagggtattgtccaccgtcagcagcgtacctgtcgaaccgctcgcgttgcccagcgtaatatcgccgtcgttggtcagattgccgacggttgacgggtcggtcatgttccactggctggtgtcgtcgagcgacagcgtagtaaacatcgcatctacactaccggttaacgtggacccctggcttaaagagagcgatgacgatgacgcgtcagtctggacaatgttgccggtcagcatcgttttttcggcctgaatagtcgctttgctgcctaatttgatcgcggtcggcgccgtaaaggtgctgttggtgagctcaatggggtcgttaatggtcgtgctgccatcaatgttcagtgcgacagtttttgaggtgacgtttgcgtcgctgaccgtcagcgcgttgagatcctcatacccgtcgagttttcttttgctggttataaagataccgtcgccgtcggcgttgatggtggcgccgtcgatcctggcgtccgacgccagaatatacacgcccgtaccggcagaggtaatgttgccgcctgtaatatccagggtagtggcgttattggcctgtaccgccgcgccgctggcattggtatgtgttatggtcgcgttggtgagattaagagcggccttattggtaccctggatggtgctcatcgtacctgcagagctgaccgagctatcagacaggttcagggtggaaccctcgtctgtcgcggtgtttccggcaacaacgtttatctggccttgcgccagggtgattgtgctaccgtccagcacgttcagcgtactgccttgttgcacctgcgcgctgctgctgttagctgcctcaacgatggtaccgtccagcgttgcttctgaacccgtatacaacgtcattacgccgaaattgccgtcaatcgttagcgtactgtctgttaacctcagtgtgctgccatccgctgcggaaataccctgggtataaatacccgtagtggttatcttcgcgtcggtaagctcaaggatagcgtaatgatccagcgaaatggcgttggaaacatacttaccgccatccggatcatcagccccgcctccgcttgtttcaatgacgagccccgtccctgtgaccgtggtgggctgccagccgacggtggcgacacccgagacatatagcgccgcgccttcatcggtgcccgaatagcttatcggcggcgttgacgcatccagaacgtggggctgcgcatcagcatatgatacctgattatcggccatagccagcgggctgaaaaatccgagcgccgcagccacggcgcaagccagcgccgcgcgcgttgcttttattatttgtccatattcggacttttggtttggagaatgggtttcactcgcgcatacttgcgctttaactttgctgtggcctcgcgccagttctgaagccacgacatacatatttcgcacggcgctccagacaatactgtaagtcctgttcaatttttaaatttccctttaataacgttcacgaagcaaactggattttgattgggctgcaaatagcctttaaatgctacattatcaatgagttaaataataaataacaaaaatacagctctatgaatggttgcaatcacctgaaacaatatattatccaagccaaattattaactaatttcaaggcttatttcaatgccaggtcaatttctggttgatttataattgatataaatacattcatccatttaataaatatttatatcgtgaataacatttaataacttcatatattgaaataaataaatgcgtgaaacaaaaaggtgtgattatcatgcgacacctggcgttattttaaatatactcgtcatacttcaagttgcatgtgctgcggctgcgttccctcaccccagtcacttactttagtaagctcccggggattcgctcgcttgccgccttcctgcaactcgaattatttagagtatatacgtagcgccagatgccgggttgcagaagggagacggcgcttttacacacgcgtggcaaacggtggtgacgccaattagcagaacatatacttttcaatgaatgctactttcactttttcatgaagctcaattgaacgtgaaaagcagattattttcgtgccagacgcataatacgttactccacgcacgtcgcataacccgctgagcctgccggcttaatggcgcagttttgactcttggtattctcatctacgccgcaatacatgccgccgcttgaggttgatttagataaatagggatagccctgcgtcggccagcctaacgagctaattgaatgatacagcgtcaacaggtcgttattatccggtgctttgctaaggctaccgcactgtttggcaatatcccatttcgtgttgtccaccgtatgcgccatcgcccagtactcgttatttgcatgcactccgttggtaaatactggcgttacgcctgacagcatctcagcctgaagccacggacgatgcagcgtttttccgttgacggatgtcgtatccgacatatttccccagaacaacgctttatccgtatccgggctggtaagtaccataaaaatcacatccagcgatgcgtgaagagtcgtattgtccgtcactttcaccgtgagtggcgttttcaaccccaggcttttatcctgattaagcgtaaacgttgccgtaccgtcgctgccggtagtgccggtaaagacaatcccggtggtggtcatactttggctggcgcttgcgggagtcagctctttaagcatgagatcgtctgctccggcatccgctgccacgtcgccatccgttatcaccatacctgcccgatttttcgaatcgccacgtgacaacgtaaaaccgacgttggcgaccgggttaccgctgctatcttttaccgtcaccgttaacggcatcgcgcttcccttcgccactaccgccgcatttttcgcgctgtccatcgccgtcgaggtcagcgtaatactggcaggagtagaagtacgcggctcgaccagacacacctgagcgccggtggcagtcgatgaactggcggtgcccttaccgccgctattcaggtttataaattggtaatatccggtattcggcgcacgatccgccgcccaccaggatttgttccccgccaccggccagccgtaatttgtaccgattgcgccgttaggattgtcgctatacaacgtttgcagatcgcccgacaacggctggtattccgcatcacagccggttgcgcccgctttttcagtgttcgctgcggtgactaagggccatgtttcattgttaaccaggtaagtaccgctattcgacgtcatctccgccgccagcagcggacgccggaacttcacgcccgcgctgttggttacggtttccggcatgtgtccccagtatttagctttatcactgtccgggctggtaatgacggtgaaaatgacgtccatatcgctaactgtcagcggatcgtcgacaagcatcgcctgtagcggtgttctcaggccacgggaatcatcctgcgtcacttcgagttgcgctttaccatcctcatccgtaatgccataccaataacttgtgcacgaagataccgtgcagttaaacgtcattgagcccgtagacggcgcaaccgatgtgagtaccatgcctccgccggaactgccatcaacgacacccgcccggtctatcgaaagcgttcgtcccaaacggatagcggtattgggctgcggcgtgccggaaccatccctcacagtgacggtcaacggcaggctctcgcccttcttcgccactggagcgcctttatccgcatccatgtcgctggaggtgagttctatcgacaagtcccggcgctttgccagacaaagctgcgccgtggcggtattggctttggttgtcagcgtattattatcgctgagtctgacatactgaaactgactgtctgagtgcgtggcatccggtactgagttacccgccccccaatattttcctgatgccaccggtaggccaagcgttgtcgtgagtgcgccattgggataatcggtatatagcgtctgtaaatcatttaccgtcggcaaccccagccgatcgcacgggctggcggtgtcctgatacatattcggataacggctccaggtataccaggtctcgttattttccgtataacccgacgtgtccgccgttgaagaaagttcagcgcgcagcagcggtcgcttaaattcaacccccttactgttggtaaaggtttccggcatatggccccagtatttggccttatcgctgtccgggctggtcactacggtaaagattgcgtctttgctgtctgtcaggttgctgccgtccatcgtggcggcgctgatagtggtttttaaaccggcggtactgtcctgcgcaagggtaaatgtcacctgtccctgggcatcagtttgcgcatacagatatttcgccgaggtatccagcaggtatgtcgccaggccggacggcatcacattacgcagcgtaatatcgtctgtgatgcttgaggacgatgtggcgctgttggcgcgattgtacgaagatccgcggctgattttcaccatcacgtttttcatcggctgacctgcggcgtctttcacgtcgatggtggcggccatctgctcgcccttcttcgcctttgcgcttccggtggtttcatcctggcctgccagcgtcagcgtcaggctggcggcggcgctgcgcggcgaggcaagacaggtctgcatgtagtacatcgaggtgctggtcgtcgttttgacatcattgccgtcgttaaacaggttgaccgccgcatagagcgacttcgtgccgtctgacgatatcacgtaatcccccgcccaccagtagcggctgacgttgttgttgcctgaactggtcatcggccagccgttacggctgcgcatggcgttatccgggtatgtcccgtacagtgtctggaggttggctacggtcggtagcgtgtcgcgcccacagccgccaccggtgccgttccaggctttatcgacggttatcatgccccaggtttcgcctttgtcgtagtagccgttggcgatggtcagcgttttgccgggcgtagcgctaaactcgctggccagcagcggacgcctgtacgccacgccgctgctgtcggtcagcgtttccgccatatggccccagtagttggccttcggcgtgtccggactggtgaccacggtaaagatgaccggcagcggcgcgctcgttacgccgttgtgttctatcgccgccgtcagcggcgttttaaagcccgcgccgctgtcctggctgatattcagcgtcagtgtgccgtcggcgcccgtggcggtgtaatagttagcgccgctgctacgcccgtcgctgtggtttatctgtatatccgccgccgccgagctattcacctcctgattcgcgcgcccgacgctgtcgccgcgcgtaaagataaccggcgtgtcggcggccgggttgccctgggcatcccgcgtggtgatgatgaccgggatggtctcgccgactttcgctttggcgaatccgtcgctgtcgttatacacaggcgaagtgagcgttatctgcgtcgccgccggatgggcgttttgcaggcagacaaaatagagttgttcattccacaatagcgaaccgacgccgccgtcgcgcagattaatcgacttaacgtagcggttttgcgtactccggctcaaatcggcggtgctgtcctggtagtttttaccgtccagcggccagccctgctgcgtattcatggcgccgccgggcctggcgtcgtacagcgattgcatatcggcaagggtcggcacgtatcccgcgccgcaggcgtcgttcgccatttcaaaatcgacgattccccacgcttcgttgttttccgtattgtcgccgtgggtaacgccgctggcgatttcagccgataacagcgggcgcttaaacacctcgccgttggccgccgtcgtcgtttccggcatatggccccacattttggctttgtcgctgtccgggctggtgaccacggtgaaaatagtgtcgatgctggccgtcgcgctggcgttgtcgtacagcgccgccgtaatcgcgactttcgtcccgtgggtgtccgggcgggtgacgttgatgattttgctgccgttttcaccggtcatgccgccgattttggtggcggtgtcgttgagcgaatcgccgtcgatcaccaccgccgagacgatgccgtcgccgctaccggcgatatgtttctccccctggcgggtatagccgtcgccgcggcttaacacgaacggcgcttgcggcagcggattgccgctggcgtcttttaccgtcactttaagctggagcgtatcgccctttttcaccttcaccgcgtgttcgctgtttgcgttataccacaatgccgcatccaccggctcaatggtgatagacgccgccgtcggatttttgctgaccagacagctcacgtagtccgacgcatcgccggaagcggtatagccgcccgcagccagtgataccgcctgccatgtagcggcgctggcgaaggtggatgaccagtagtcatactcagtcggccagccggatacggtgtggattttattgccgtcgctggaggcatacagtgcggcaagctgatcggcgcgcggcagatggccggcctcgcagcccccggcgttggggttattcagcgcgtcggcgtggctgacacgcgcccaggtttcgttatcctgctcctgggtacgggtggcggcagtcgcttccgccgccagctttggccgctggaatttcatatcacccacggtgagcgtgtccgccatatgaccccacatctgcgcctccggcgtatcggggctggtggcaacggtaaatttcacgctgcggttgacgggcgtggtaatcagtgagttgaccggcagtacgctcagcggcgtcagcaagcccacgccctgcggctgttcaatcaccagcgtggcgttgccctcggcatcggtcatgccctggtacgtcatcgacgcctgggaagagccgaaaggcgttccgcccatcaccagcgttccgtcgctgggatcggtaaagcccgtggtggcgttgtcgcgatttttgccgtgcgacatggtgacggtaaagctggcgttaggcacgcttaacccattcagcgcattgacggaatggacgttcatcgtgatttgttcgccgactttggctaccgcattgcgtaacgactcatcgccattaaagtaaacgtccagactggtcaccaactcattgccggagcaggagagatagttcggttcggtgccgctgaacgtgctgtccgcaccggtcgccaggttgacgtgcgcggtggtggaaccatcagtatccgccgcgatatagctgtgtttctgcgtcggccagccgtaggtcgtttccatcgcgttgccggaatgggcctgatacagcgtatccagcaacagttgccccggcacctggccggtaccgcactggttcgtcgccgccgttaccgagttaaacgtcgcccagtattcgttattctcaaattcggaaccggtatcctgcgcggcttcgtccgccagcagcgggcgtttgtagatattgcccgcttccaccacgccctgcatatggccccacatgcgcgcctgcgccacgtccgggctggtgacgacggtaaaaatcacgttctgcgtcgcttccgtgccgtcgaacagcaccacgcgcaccggggttaatacgcccgcccccttgtcctgagtcaacaccagcgagaactgaccgttggcgtcggtgacgccgtgatagtgaccgtcgctgccttccagattggtgataattaccggatcatccgtccactgatgcccgctatcaatatcggcgttcttttgattctggcgattttgctcgtcgcccaggtagacgttaaagtagcgataaggcagcggtttattggtggcgctgtcggtgacggtgatcttcatgttgatctcttcgcccaccttcactttcgccgcgttgaccgttgaatcaaaattatcggcgctaatcactaatttcggcgtgaccgcaggcggggctttatccacgcagctaaccagcgattgcgtggcgtccggcatctgcgtaagggcgcggctgcgcatatcaatgctgatatggtcagtggcagtcgatccctgggaggaggaccagtactcttcgtcaccggatgtcagccctaccggccagccgagggtggtggccagatcgccgcgcgcaatttttaacccttccagttggcgtgcatccggcagaatatcgcagtgcgcgtcggcgtggccccagttgaactgcgcccaggtttcattgttgatgctggcggtgcggtcttcactgtcggtttccgccgccagtttggggcggtaaaaggtgtagcttgcgccgtccaccgtggcggtggacgtctctgccatatgaccgtacatgttggcgctgctgctgtccgggctggtgagggtggtaaaaatcacgtccacgctggctttcagcgctggcgcgctcgacgggtgcgctatcagcggcgttttaacgcccgggccgttcgcctgggtgacgaccacggtcgccacgccctcggcgttggtcgtaccgtgatattccgtggcggtggtggtcagttcggtgttgccgacgcgcaccggcgcggcattgtttaccacgccctggcggttttgcgcgtcgccgcgggtaatcacgaaatcaacgttgccctccggttcgccgccgcagtctttggtcgttaccgtcagcatgatgctttcgcccgctttgaccttcgcggcgttgagcgactcatccagatgatcggcggcgagcgttaccgggtcgcccacggcgggcgcgatatccacggcaaacttttgatcaagcacttcgaccgccgtgttataaggcacgccggtgcgggtaagcaaccacagcggcggtatggcggttgaggtatccagttgcgaccagaccaccagatggcggcccgccagattctgcgcgcagaaacttatattgctgacgggttgtggatcaagcggcgtgtccggcgtggcggcgtcggcccacaccagcgtaacggcgggcgcgcgttcagcctgccaggccagcggcggcacggcgaagatatcgccttcggtgtcgtgcggattggttaaggtcagcgcgctgccgacatcactggtgctgaactggctgggcttcgcggagtagtcaacaggattcgccgcatcagagcgcaactgcacgctgccctgatataccgggatcgttacactgtcggcctgaggcggagtgccattaatagccgcagtttgctcagtgagttcctgccatgcgccgctgcttcgcacggcctgcgcgaagaaaggcgttaaactgagggcgcatagcagcagccagggtaaaaaaccgacacactttttcgatttcactgacgtacctgagaaaagtccatttcgttgcagttcattccatgaatacaaaaacgtaaaaatacatcgctaccggaacagcgccagctacaagggatacccaggttgggcgccgcaaagcgtcacccaacattcaaacgcgctcccggccccattccccattcactacggcacccggcacgagcctaagcccgaggtcgtcgctttttcacgagtacaggttgtctggccggtcgtttcgttaaatgaacagtagtacttattgctttgaccttcatcttgcgacacatagtcccaggatgatgtcgtcggccattgcaacgtgccgataacgctctgcaacgctttcagatcgtccagcgaggctatattttcctgcgatccgcaaagatgcgtcaacgacgtttccacgtgttcggactgataataatagttcgtcccccagaattcattattaaacggccaggtatcccggggcgcggcagagagctcggctttcaggtacgggcggcgcagcgtaacgccgttcacctgcacggtatccggcatatgaccccagtatgacgcatacggcgtatccgggctggtttgtaccgtaaagattgcatctacgctcgccgcctcatcaaattgattcgcaagcgccgccgtgacagacgtttttaaccccagcgatttatcctgagttaacgtaaaccgcaacttaccgtcatcgccggtgaagccagaccattttgtgctgaggccattctggttattaaacgccactgccgtacccgcaggtgcaaccggcgccagcatcatattcgccggcgaagttgtaaacggaaccggctcgccaatcacgcctggttcaatgtattgcttatccaccgcaccgcgcgaataagcgtaatcacgcgtcaacagtacggccaccccggcctgcggctgcccggcgtcgttagtcaccgttaccgtcatcggtatcgtttcgccttttttcgccacggccgccgatttatcggcgttccatgcgtcggaagagagcgcgatattcagcccgctgcgcgatgttgtcaggcagagttgtaagtagtagttacccgggttttccgacatgctgtagtttttccccgtcttgagatctttatactgccagtaaagggttgagcctttcagcaggctatcccccgcccaccaccgcttcccgacgggcaatccaatatcggtcgccaccttgccgcttgggtgatcgttgtacagcgcagtgaaatcatctatcgcagccatctggttcatcggacatccgccgtaattaccggtattaaaactattcaccatgatccagttttcattggtttcgaaataggtatccgtgtgcgcctccgatgagggctcgcctgccaccagcgggcgcttaaactccgcaccgttgctggcggtgaaggtctccggcatatggccgtacatgttggccttgtcgctgtccgggctggtgaggacggtgaacaccaccggcagcgatgaggtcgccgtcggcgtatcgttcagattcgcggtcagctggtttttcaaccctatgccgccgggttcggcaagcgtcagggccagcgtaccatccgcgccggtggcgccggtcagaaccgatgtggcatagtaaaactgttgctgcgcaccggtgagcggcgtcaccgtcatgttggtgccgttagtggctacaaatttattatagtcagggttgcgcgccttcccggcgtcacgtttaagcgaaaaagtcgcataaggcaccgggttgcccatcgcatcggtagtggtgatgagtagcgggatcgactcgctgtttttcgccttcaccgcctgaatagcgtcatccatcgcctgcggggaggtgagggtaatctgcgtggcctgcggcagcggcgtcgtggcgcaaatttgatactgccaggcagtgctggtcgcgctgttttctgaccgacgcgaaccatcagccagatcgactgcgtaatagaagtcaagttttgccccgctggaaaatgacgtcgagttcgatccgctccagtaagaatagtagaccggccagccctgggcggtatttatcgttcggctcgggtatttgctgtagagcgaatccagcgcctcaacggcagggtaatagcccgccgcgcaacgggccggattggccccttcactggctggcccatgaaaaaccgcccaggtttcgttggtttcttgcttagacgcagtattgtccgtactggacagctcagcgtacagcagcgggcgctggtacaccgcgccatccgccgccgtcagcgatggcgccatatgcccccacatgcgggcaacgctgacatccgggctggtgacgacggtaaagatagtgtcgatgctggcactcacggcggcattttcatacagcgtcgcgttaatcgcggtgcgggtgccgtgggtgtccgggcgggtgacgctgatgatacgggtgccgtcagtgccggtctgcgaccccattttggtggtggtccatgccagcgattcgccgtcgatcaccacgggcgtcacgatgccttgcagatcgtcaccgtcctgagcggtatacttttcgccccggcgatcgtaaccgtcgccgcgggtgagcacaaacggcgcttccgggatcgggttgccgctgacgtccttcaccgtcaccttgagctgcatcgtctcgccctttttcactttgaccgcgtggacgtcgctgccgtcgtaccactgcgacggattgaccggttcaatggtgatggacgccgccaccgggttatcgctggccaggcagctggcgtaaatcgagacgttgctgttggcaaattcactgccgttcgtcagcgcgatcagtttccaggtggtggcgctctggtaggtggacgaccagtagttaagataggtcggccagccctgaatgctgtgaatcttgccgccgctgttggcgttatacagcgcctcaagctggtcgatgcgcggcaggcggttcgccgcgcagccgcccgcatccgggttgcccaccgcgtcgctatgggccacgcgcgcccaggtctcattgctctcgtcctgggtacgcagcgggttgctcacttcacccgccagtttgggccgctcaaaggtccagtcgcccacggtaatcgtgtcggccatatggccccacattttggccgctggcgtatccgggctggtggcgacggtaaacttcacgctgcgggaaaccggcgtgctgattaatgaatcgacgggcgcaatatttaacggcgtcagcagccccacgccctttttctgggtgaggataatggtcgcatcgccgttagcgtcggtgatcccgtgataaacctgcccggcaacgtagcccacgtcgtcaaactgcatctcgccgttgctggtatcggtaaagccggtcgtcagcccgtcacgccgcctgccgttcgccatggtgatggtgaagtcggtattgccgatcgccatgccgttaagggcgttgcgcgaatggatgttcatcttaacctgttcacccactttggcgtcggcgtttttgatcaccgggtcgtcgttgaagtagacgtccagcaccgccaccatttcattggccgagcaggtcaggtagttgggcgtatcggtaaatttgccgctatcgccgttttcgaggttgacgtgtaccgtcccggaggcgtcgctgtcggcggcgatgaaataatcttcagtcggccagccgtgctcgctttccatctgtccgcccgcatgttcgctgtacaaatgcgccagcgacgactgatccggcacctggccgacaccgcactgcgcggtggccgacgccacggagttaaacgtcgcccactcttcgttattttcgctgaattggccgtctttatggctggcctccaccgccagcagcggacgtttgtacaggttgcccgcgtccaccacgccgcgcatatggccccacatgttggcgccgtccacgtccgggctggtgaccacggtgaaaattacgctaaaggacagctcgacgttgccgccttcgtcgtccggcatcacgatgcggatgggcgtttcgacgcccaggccgctgttatgttttaacgtcaggtgcgcctggccgttgacgtcagtcacgccggtatagtgctccggcgacgaggcgctcataccttcggaatcaacggtgacccgcaggttatcccatgcgtcctgatgttcccctttgcggtttttcgccgggtcgataaacagctccatgtagcggtaaggcagcggtttttgcgtgtcccggtcaactacggtcatcgtcagatcaatcgactcccccacctgcgctttatacggtccttgtggggagagagtaatctgcgggtgcgccgcaggctgggctttatccacacaactgaccagcagcgtgtcgctgtcggcggccctgacgaccgatgcgctgttcatatgtacggcagcgtggtagccgctcagttggtttttggtcgatgaccaatattcagcatcgcccgccaccggccagccggtccaggtttccagcgtgctgtgctcatgtcgcatctgcaccagctgttcggcgtccggcagaatgtcacagtggttatccgcgccgctccaggtaaacagcgcccaggtttcgttggtatcgacgacgcttttgtcagcgccgctcgcttccgccgccagcttcgggcgggtgaaggtgtaggttataccgttcagcgtcgcggtagcgctctctatcatgtggccgtacatactggccttatcgctgtccgggctggtgatggtggtgaaaatgacggcggtttcagccgtaagcgccggaaagttgaccgagctgacaaccagcggcgttttgacgccggggccttccttctgggtgaccaccaccgtggcgttgccgttggcgtcagtgacgccgcgatattccgtttgggtggtcgtgagctcggtatcgccaacgcgaaccgggttggcgttattgaccacaccctggcggttttccgcatctttacggcggatgacaaacggcgcgttgccttcgggcgtgccgtcgcacgctttggtggagatggtgagggtgatgctttcccccaccttcacttttgatgcctcaaaggccgaatcaacgtgatcgccgctgactgtaaccggcgtgtcggtggccggtttaatgttgagcgccactttcgggcttaacagcggaatggtcgcataattcggcaccccggtacgcgtaaagagccacagcgcgggaacgttggtttcatcttccacctgcgcccaggccaccagctgtcgcccggcgaggttttgggcgcaaaaggtcaggttcggaaccggctgcggcgagagcggcgtgtcgggcgtggcggcatcggcccataccaggcccatggcgggcggctggcggttttcccaggcgatggtgggcggatcgctaaagagatcgccttcggtatcggtggaattgaccgcccgcatcgaggttgaggtagcatccgcgctaaaatcgcgcggcatggcgctgaattcaatatcgtgggttttgctcgggtcaagcagcgtacttccctggtaaagggggataatagcgccgtcggccagcggcgcggtgccgttaaccgcaccggtgactgagttcagctcttgccaggttccgcccttcaatagcgcctgcgcaggtgcgatcgacactgcaaacatgatcagtaatgtcagtaagaaatgtacaactttattcacttgccgattcctgtccatgagcgatagccacccgttttcattctctgtcgtaattcaacccactttgcttagcgcgcggctaagcaaagtgcgcggaaaataccactccccgcggggagtggtatgttgaggacaacttatttgcgtttgtagtcgatggacagaccaaagccctggacaccgtcgctacccacggtaacgccgccgtctgctccctcgaacgccgttttcgcttcggcgttggtgacagggatgacaaggtctttatcgttccagctttcgttgacgataccgccggtaccggtacctgcaattttactggtgccgacgaatttccagcggtagtcatactggtcggtaacgttttcaccggcatcataggtaccgttgccgttcttatcgctccacagcaatacctgataggtggtattcgttttgagtgtcgtccctgaattcttcaacaggttggtattcgaatctttctcatgaataaccacatggacgttttcatccaccaccggaccttccggaatttcgtcatcatccgaaccaccgcccgcatcggtcgacaggtctttcaacagcagttcggttgccacggcagggtcaccggtggtagtggttggcgtgattttgataccgatataacgatccgcatcagcggcctggatttcataactgtcaccagtaccaagatctttggggtcgctgccattctgatcgctaaagctcacccatttcacggtggctttagttgccgtgttgtcggtgtccaggtcgccttccgtatcgccaatcgcccagttcaccgtgaccttatcgccaacgtggaactgcttatcgccttcggtcacaattttacgatcgccgcgatcgatagttaccgttacgtgatctttgtcggtatccgcagttttatccgccgcacgggtaatccacggcaccgtaccctgaatggtgcccgtctgttcagagacaatctgccactgccccgatttcagattaccgtttgccgccaccgctggcgcggcgcaatacccggcaactactaatgctaaagcgaccttcgtcagccgccgttttactgttgcttgcattcagactctcctttttctcaaaattcagcggctggctggtcagccacaacgctgacgctatttctgactatacgtaacgcgtatgccgtaaccctgaacgccatcttccacattggcggcaaacttctgcgccgcctctttattggttactggcaggacaagatcttcattcatggtgttggccagcgcgccggtatgtccgtttgtactctgcccggtaaactcccactggtagtcgtacagcgccatctcttcttccgtgagctgctcggacatctggaatacgccgtctttatttttgtcgcgccacagcaggaaacggtaagcattattgaccgtagggtgcttatcttctttgccgataaggttgacagggttggcggctttgacctgataaatcaccgcattcagcgcgctcaggttgtcgccgataaaagtgacatcaacgtagttactgtcgccataggcgtctgctttcgccttccagcggaaagtccccggcagggtgctggaaagcgtcaccgtccccgcttctttgtcacgactggcaataaacacgcagggggtttccgtggtgcagggcgtctgggccagggtgacttttttatcattgctgtcgtacaacacgggcgtcatggcatcgtccaccagttcgttaccattgcgatccgtggagtcgccaaaggaatcggtgatcagcagatccatcaccacgccgtcttcgccatcggccagcgcgctggcttcatggctgtgatcgctgcgatcggtatcggcaatgttgtcgacgatcagctcaattttgcgatcctgctggacggtgatttccaccacgccggagttctgcttattgcccttttcatcttccagcgtcatgcgtactttccaggtgttcagggcggtgcgctgctcttcggtatcggcattaacccaggcaggaagcaccagattccagctgttattgttgccttcggttaacgcattagcttttaccaccggcatcaccagcgtacgggcggcgttgtttttcgcctgccaggaggcagaaataattttgtaatggtggttaatcagcgcgttgacagtccatttgcacttttccagaccaacagcggcctcaggcgtatcttcaatcacgcattccgggtgttcattggtggcgtcagccttcagccacaacgtgacgtccagcggatctttctcacgatattcgagaatgatgaaattgttacgatcgacaaaatcggtgcggctgcccattaaggagtgctgaattttaacgttttccggatcgagctgcgccgccagcggcgtgcctatctggtagttcacggtcgcgttaacgctaaagtcgttactatcgccagtaccggctttgtaatccgtaccaaccgtgaccagcggtaccggcgtatattccagccccaaagtgacggcatgaggatctttttgcagattatcggtgccaaacagcgctacttcatcgccgtagtactgttcgtaaactaatttagcgccaagctgcggataaaacggcagccagctttccatgcggatatcccagccgcgcgcgggtcgttcttcataaaagtcgaaatcttcggagtctttccagtcagaaagaggatggtaatagttgccggagaatttcaggtaatccgtccaggcttcagttcccagacctaatcgacggtgaccgcgcgtaaaatcgtagtcatagaatgcgttgccgccaagcagccagttgccgacgttctggcgaacgccaagcccaaagttaccaatggtgcggtcttccttacgctgagccgaaatctggctaaagaaaagcgtgctctggttgtcataccagggaataaaataatccagcgaactgccgtccagatcgccgccttcgcccacggacaggctggtacggatcttgccataaggtgacattacaccttcaagatatgactgtgctgaggaagtgatttggttttgcaaatagctacgcgcctgggattccagcgcttccggggtgagattatcaaagccctgggtggcggaattaataaagtagtcagcgccctgttctttaaaggactttcctttattttcctgttcttcttttttcgcggattcgctggctaaatcaggcagggaggagtggctttcatcatttgcagatgcagagttatctgcgccagaagccgcaactgagactccagacactaatagcaaaaccagaatgcgaatccttcgcaccatatgatatccctgtcgttaaataaaaacgcctctatgaaaagatattatatggatgattcagatggaatcataactaacaggcctaaatatattcctaaaaagaaaagtttaatatgaaacagatttataatattgatataataaataaaaagaaagctgttatttatttctaatattaattttcgggaataatattccctataaatagttgaatcaataaaaagaataaaataaccgccgggcaggatactatgctgatattacgggagtatcgaataacgcttttgcccttagccggataagacgtcggcgcctctgctctgcggcgcaacgtcgacagcggttttattgatcggaaatgacgaaattaacccgtttttttgaaattaaaccatgaccgttctggcaaaaatagtccactgcgccgcaggctttcaaaacctgtaacggctggcggcagtcaggacaaagtgcctgtaacgagaaatctttagcgcatgtctcgcaatgcgctgtatcgccattgcgctccagcgcgtgatggcaaacggggcaggttatttccataacattctcctcaggcgcgtgacttacttttacttgaaaggcctgatagcgcagcgcttgtcaggcctggaatattactgaaaaagcattacttgcttttcttgatatgtttcatcagacgcttacgtttgcgcatttgcgttggcgtcagtgtgttacgcttgttcgcatacgggttctccccttctttaaactgaatgcgaatcggcgtccccatcacttccaacgacttgcggaagtagttcatcagatagcgcttataggagtctggcagatcttttacctggttgccgtgaatcaccacaatcggcgggttatagccgccagcgtgggcatatttcagttttacacggcgaccacgcaccagcggcggctgatgatcttccaccgccatcgtcatgatacgggtcagcatcgcagtgctcacccggcgagtggaactgtcgtaagcctcgcgtacggactcaaacaggttgccgacgccgctgccgtgtagcgcagagataaaatggacgcgggcaaaatcaataaagcccagacggaaatccagcgtctctttcacctgctctttgacttcctggctcaggccatcccatttgttgactacgataacgagtgagcgcccactattgaggataaagcccagcagagacaaatcctggtcggagatcccctcgcgcgcatcgataaccaacagtacgacgttagcgtcttcaatcgcctgcaacgttttaatcaccgagaacttttctaccgcatcggtgatttttccgcgcttacgcacccccgccgtgtcaatcagcacatattcccgttcgtcgcgttccatcgggatataaatgctgtcgcgagtggtgcccggcatgtcgtataccaccacgcgctcttcaccgagaatacggttagtgagtgtggacttacctacgttcgggcgaccgacaatcgccagctttatcggcaggctttgcgggtcaaaatcatcttccggcgcttcttcaccattttgttccgcctcgaactgcgcccagtattccgcgtcttcatccacctcttcctgcggcgcgacatcatccatccacggcagaagcacatgttccagcaggctcaatacgccgcgaccatgtgaggcggcgatagggtaaatttcgcctaatcccagcgagtaaaaatcgacaaccgcctgatcgggatcgagaccatccgttttattcgccaccaggaaggtcggtttttcacgggagcgcagatgtttggcaatcgcttcatccgccggcatcagaccagcgcgcgcatctaccatgaataacaccacatccgcttcttcaatcgccagcagcgactgttccgccatccgcgtttcgacgccgtcttcggtgccgtcaataccgccggtgtcgatacagataaactcgcggccttcaacctccgcacgaccgtacttacggtcacgagtcagacccgggaaatccgcaaccagcgcatctcgggtgcgggtcagacggttaaatagcgtggattttccgacgttagggcgcccgacaagcgcgaccacaggtaccatgtttaaagcctcatttaaaaaatcatcagacaacgcgcgtcatttttacgccgttgttaaaaacaggaaaacggcccctacaccaggagccgttttttaaaacacacaaccgtgacgattaacgcgtaatcgcgtagaccgtaccgtctttggcctggatgagcagtttaccatccgccaccgtcggttcggtcagaaaaccggaactgtctactttttgttgggccacaaaacgcccgtcatcgacattaatccagtgcagataaccttcgctatcgccgacgactaaatcaccattatacagcaccggggaggtcagcaaacggtgcagcaaatcgctttgcgtccacagcgttacgccgccgtcagtggtcagcgccagcacgcgatcgttctgatcgaccaggtagatacggtctccgtcgacgataaagtcattgaccgaacccagctcgcgtttccacataatctgaccactgcgcagatccagcgccgttaagttaccattatacgccaacgcgtaaacgacgccgtttaccacaaccggcgtggtatcgacgtcgctcagacggtcaatttccgttgggccagtggcctgggagatacgctgctgccaaatcatctgcccttgttgcatcagcacggcgctgacgcggccattatcaccaccaacgatagccgcgccgaacgcggttgccggcgcagattcgccgcgcagcgacagcgaaggcatatccaggttcaccgtccatttaatggcgccatccgcctgatttagcgcctgcaactgaccgttgctggtatggataagaacgattccatcactgacaaccggacgagacaacgcttcgcctgcgaccttcgtctgccatgctgtggtaccgtcgctggtattcagcgcataaacctcggccttttcactgccgatatagacgtgaccgcccgcgacagtgacgccgccggacaacaacgcggacgaacgagagaaccagccgtctttctcgcccagattcacagaccagatctctttgccatcatccgcattgagcgcttttaccacgcccgcgcgatcggctgcatagaccacgttatctaccattaccggatgaaggttagaataaaattcgccaattccgttaccgacagaggtgctccagacagtggtcggggtaaactggttttcaacctgcggtaatggagacatcttgacgacatcttcttcgccgctaaacagtgaacagccgctgagcagggtaacggaaagcaaccctggcagaagtaatttacgcaattgcatcgggtccctctcagatggacaaattattgattttcatctgcatcatttcgctcaacgccggagaagcatcgctattgacgcccgcttcccatgcgctgcgcgcgccttttttatcacccttactcagcaacgcttcgccgcgcaaatcagcgacaatggctgtccatccttcgcctttaacggcatccagagttttcagcgcggcgtcggcttgcttaagctgcaactgaacgcgagcgagacgcagattaatcaccgctttgagattttcatcgctggtggccgccaacccctgctgcaactgggcttcggcttttttaagttcattcttatccacaaactgctgcgccagttccatagacgccagcgcaccataggtgtttttattctcagccgcgaatttttcagcggcgggaatgctatccggcttatcggcgcttaccgccgtcaccgcattttgatacgccagagaagcagcacgcgcggactccgtctgatggctgctccagtaacgccagccaaccagcgcgccaacccctaaaatcactccgacagccagcgctttgccgttttcggcaaagaagcgtttaatcgcatccacctggtcgtgttcgttctcgtaaatttccacgctgtccttctccttagcccaataaagtgcgcaaatgcgcggcgacgctgtcctgcgccactgccgtttgctcaccggagcgcaaatccttcactacaacagtcccatcggcgacttcagattcgccaagaaccagtgcaatacgggcgccccacttatcggcgcgggcaaactgtttcttaaagttgccgccgccgtggtttgtcattagcttcacgcctggcatttcatcgcgcagccgctccgccagcgtcattgccgcagactgcgtttgtgcgccggcagccaccaggtatatatcgacaacaggagaggcaataaattccggattaactgcctgaactaacaaaacaagtcgttccaggcccatcgcaaagcccactgccggggtagcgcgaccgcccagttgttccaccagaccgtcataacgaccacccgcacagacggtgccttgtgaccccagactgtttgttacccattcaaatacggtgcggttgtagtaatccagaccgcgtaccagacgctggttgacggtgtaggcaattcccgccgcgtccagcaatttacacaggccggcaaagtgctcgcgtgaatcgtcatcgagatagtcgccgagagcgggcgcgtcgttgagcagcgcctgcacgtccggattttttgaatccagcacgcgcagcggattggtatacatacggcgtttgcagtcttcgtccagcgtctcttgatgctgttcgaggaacgcgaccagcgcatcgcgatagttcgcacgcgcctctaacgaaccaatagagttcagctccaggctaacgtgttcagcgatgcccagcgcgcgccaccagcgtgcggtcagcataatcagctccgcgtcaatatccgggccttgtaagccgaagacttcggcgcctagctgatggaactgacggtagcggcctttttgcggacgctcatgacggaacatcggcccgatataccacaaacgctgttcctgattgtacaggagaccatgttcgatgccggcgcgtacacagcccgccgtaccttcagggcgcaatgtcaggctatcgccgttgcgatcctcaaaggtgtacatctctttttcaactacgtcagtaacttcaccgatcgcacgtttgaataacggggtctgctctacaatcggcaagcggatttcactgtaaccgtagctgccgagcacgtttttgagtgtgccttcaatgcgctgccagatggcggtttcgccaggcagataatcgttcatgccgcgaatggcttgaatgttttttgccacgtttattctctttctgaatataaaaatgaaccctcagcgcttccccgaacgaaccgggagccatgcgggttcaatcatacacgggaagcgcgccgcttcccatcacgttcttatttttcaacctgcagcacgtcaatccgacgcgcttcatcaagttgacttgctttcgcgcgaatacgggattcaagctgcgcgatcatatcgtcgttatcgagtctgtccttacgcacgccgtcttcatacaggccgcttttcttattgccgcccgtcacgcccagcgtcgataccagcgcttcgcccggcccgttcactacgcaaccgatgatcgagacgtccatcggggtgatgatatcttccagacgctgctccagcgcgttcaccgtgccgataacgtcgaactcctggcgagaacaggtcgggcaggcgatgaaattgatgccgcgcgcgcgaatgcgcagcgacttcagaatatcgaaaccgactttgatctcttccaccgggtcggccgccaacgatacgcgcagcgtgtcgccgataccttccgataacagcagacctaaaccgatcgccgacttgaccgccccgctacgcgcgccgcccgcttcggtgatccccagatgcagcggctgatcgatctgtttagccaacaaacgataagactcaacggcaaggaatacatcggacgcttttacgctcactttgaactgatcaaagttgagacgatcgagatgatcgacatggcgcatggctgattccagcaacgcctgcggcgtcggctcaccgtatttttcctgcagatctttttccagcgatccggcgtttacgccgatacgaatagggatgtttttgtcgcgcgcgcagtccaccaccatacgaatacgttcttcgttaccgatattgccggggttgatacgcaagcagtcaacgccgtattccgctactttcagcgcaatgcggtagtcgaagtgaatatcggcaaccagcgggacgttaacctgctgtttgataagcttgaacgcttcggcggcgtccattgtcggtacagaaacacgaacaatatctgcgccaacgcgctccagcgctttgatctgattaaccgtcgcttccacgtcagtggtacgcgtgttagtcatcgactggacggcgataggggcaccatcgccaatcggcacattcccaacgtaaatacgtgtcgattttctacgttgaatcggagcctggttatgcatgaaaaacctcccgcgttacccgtctgttactgcgccggtgtcggttcggcattaagggtcagacgcgcaacctgattagttctgataaagcggctcagatcgacaggttttccttgatactggatctgcaccgcggccggcgcgccaattttaagtttataaggcgcctgaccggttaggtttaaattaccatctttacgctgcataccgctaaacagcttcttacccgtggcgtcagtgacttcgagccagcagtcagcggtaaaattcatcaccagcgcgttcggatcggcagcaggcgccgctacgccagcctgactggtcggcagcgcggacggcgtctccgttgccgctggcgcggcagatgtcgcagccgtatcgacattcgcctgcgaaggcgcgactaccgtattttgcgtcgccgccgccgttggcgctggcgtttgcgtcgccgccgtcgaatcaaccggcgtcgcaggagccggagccgtttgcgctggcgtcgtatcctggcttgtcgcggcaccggtgtccagcggtacgctttggccgctgtctttatctgcgttcagttcagccgtgctttgatcggccatcgtcgtgatctcttcctgctgcgccttgtggttctgccaccaccaggcgccggtcagccctacgaccacaaacagtaccagccaggtaaaagacattaaccagccgtcgcgttttttacgacgctttcctaatgagaaactctgcatcggggcgactttagcggcgcgcagcggagcttgtttttccagccccggcagcagttcctcttctggaacatgcaccagacgcgcatatgagcggatatatccgcgcaggaaggttgaagcaagatcggacggcgccttatcttcttcaatatcgcgtaccgtagaaaccttcaggcaaagtcgctcagcgacagcctgctggctgagtccgagttgttcacgggcattgcgcagacgaacgccggtggtttgtgcttcattttggtcgtgcgtggcttcagtattcattcgctacagctacaggtacgtgtaaattaggattcaggcgccgacgagccgtaatgcccgcccacaccgcgaaacatcaggttagttaaccttagtcagacagtataagcctgtcaggccgcagatgacaaaaccgctaagacacaaggctaaactcttgttgcaccattacatactgccttaaagtcgacaaaaacgcaccgttattattgaccagacaagtacaacgccagacattattcaactgacattgcgccacggtataatgaatgccccgtggcgcaactgctatcaaatagccttgatgtcaatcacctctccctgcatacgcttacgcagggtacgtttggtacggtcaatcacatcgccagccaactgtccgcatgccgcatcaatgtcatcgccacgcgtcttgcgtacgatggtcgtgaaaccataactcatcaaaaccttagaaaagcgatcgatacggctgttagagctgcggccatacggcgcgccagggaacgggttccacggaatcagattaatcttacaaggcgtctcttttagtagctccgccagttgatgcgcgtgttcagtgccgtcgttaacgtggtcaagcatcacgtattcaatcgtcacgcgcccctgattggcgttggatttctccagatagcggcgaaccgcgcccaggaacgtttcgatattgtattttttgttgatcgggacgatttcgtcgcgaatagtgtcattcggcgcatgtaaggagatagccagcgcgacatctatcatatcgcccagtttatccagagcaggcaccacgccggacgttgagagcgtgacacgacgtttggacaggccgaaaccaaagtcatcgagcataatttccatcgccggtacgacattggtcaggtttagcaatggctcgcccatccccatcatgaccacgttggtgatcggacgctggccggtgactttggccgcgccgacgattttcgccgcacgccagacctgaccgataatttccgatacgcgcaggttgcggttaaagccctgctgcgcagttgaacaaaacttgcactccagcgcgcatcctacctgtgaagagacacacagcgtagcgcggtcgtcttccgggatatagaccgtttcaacgcgctgatcgccgacagcaatcgcccacttgatggtgccgtctgaagaacgctgctcttcaacgacctccggcgcgcgaatttccgcgacctcttttaatttgccgcgcaacactttgttgatgtcggtcatctcatcaaaattatcgcagcaatagtgatacatccatttcatcacctgatcggcgcggaaaggtttttcacctaagtttttaaaaaactcgcgcatctgctgacggttgagatccagcaggttgatttttgtttctttgttaggaactaccggggtactgctttcaggtgtgacaatttgttcagacatatgctattccggcctcgttattacacgttatggcccctggagggttgaaaaaagaaacgccccggtaagcttactgctcgtccgggggcgctgcattgtacaaattctggcgtaaggatgccacgtctgcacgcggcattagcaaaaataatatttgaaccgataatttatcgccaacgcatttacagcgtgaaagacgaaggagattaacgggtgcgcgggcacacttcgccttcaccgaagaaaaaggcgatttcgcgctgcgcggattccagcgaatccgaaccgtgggtgccgttttcagttaagctatcagcgtagtcggcgcgcagcgtacccgccaacgcgttcgccggattggtggcgccaagcagatcgcggtgacgctgtaccgcattttcactttccagcacggataccacgatagggccagaggtcatgaactccaccagaccgtcaaagaacggcttgccgtcgtgctcagcatagaagccgcgcgcctgctcaacggtcaggtgcagcattttagtgccaacaattttgaaccctgcagcttcaaagcgcgcaaagatgctgccaataacgttttttgccaccgcgttgggtttaatgatggaaaaagtccgttcaatagccatgtttacctctgaaatatgttctgttgttatgtcaggcgcggattataaagagcatcccatcaattgcctatggatgcaggtaacatttttttaaaataaaatgagcattagcaacaaaagttaaaggcgcacagcaaactcaggggactgacacagcacgcagtgcgtgtgttcaggcgtgagagcatgaaaagtacgtttgcagatgtcgcaggtgagcgtatacgccgtactatgccgcgttgaggcgggttccacgtcaaaccgcagccgcagcgcctgatgcggacataccgccgcacagccgccgcatcccgtacaacgcgccgccgctatcgtcagggtattgtcgtcaaactggataacgttttccgggcagcttcgccagcaggcgccgcacatcctgcactcttgcggactgatttcgggtacgcattcgctgaacgcggaaaacgcctgtctgagacgccgtttccccggctcgacggcgcacggggtaatggcgtcgcgcggaacatgaaacagagtgcgccgcgaggcgttaatctccgcgccgacaacgtgtttgaaagaccagcccggctcgccgtagcggcgcagcgctaaatttagcctcgccagcgccatcagccactgcgccgatcgctccaccgcaatatcaataaagcgaataccgtactggctgtgccagagaagcagttcatcgaccgttggcgcctgtagcgaaaacggccccaccaacgtatccccctgcacaaagcgtttaaccggtttgataccggtaatggcgtcaacaggacagacaaacagacagtcgccacaggctatgcagcgcgtcgtatctatgctgacctgcccctgcgccagcgaaaacgcctgcgccggacaaacatcggcgcaagcgcggcaggaagaaaaacgaaagcgacgacggacgcaggcctgcgtcacgtctaccgccggatcgatcgtcaggttaaccatcagccaatactaaagaagacgtagcgcagcataatctcgccgagaagcagcaatacgctgcccgccaccagcgtccctctggcgtttcgcagaccgcctgcggcaaagcagagcattcccgccgctgagacacaccagccgagaagatagacgtcacgcaactgcgccagcgcctgtagcggatgatgcgggaaagtgacgaccgtcgtatccaccgcattaatatccgccagccatagcggctgcatgatcaggcgaatcagcaccatcagtgcgaccaccaccacagcgcagcgcattgcggcgccagcgttgcgcagataagccagcgcaatgactaccgagccgataatgcctgacgtgccaaagaacagcgccagcgtgttgctatgctgccaggtcgccaccgaggcatggatataaacctgcgccatgcagaatacatccaccagcccaaacgctgccgccagcgccagcagcggctgccagcctggctttcggaaaaacagcagcacaatccctagccccagcgccgccagataaaggctggcaaagacgatttcgcgactcagccacgaactggcgacatgacgtaacgcatttagcgcattcaggggatagcccatgtgcagcgctgaagcaagcagccccacgcaggccagtacaaacgcccccgccatcgcgggaagcgcgccgcgtgcaggcacgcgtccctctacggcgtactggcggcccaacgccagccacactgtcacgcccacggacccttgcaaacagagcgtaaaaatcagcagcggtaactcatgcatggcgtttaccctctttttctgcgccctgatgcgctttgacaaccagattaggtttggttatggatgaatctggcagcccgttaacgtcgcatacgctaccgtacttcgcgcgcagttcatcaatcggaccaaacttgatggcctccagcggacaggtcgcaacacagacgggcggttcacctttcgccagtaaatcaacgcacatgtcgcacttagacatttggccggtctgctcgttaagctgcggcgcgccataagggcaggaccaggcgcaatagccacagccgacgcatttgtcggtatcaacgcgcacaatgccgtcacccgggcgtttatgcatagcggtagtcgggcaatttttggtgcagacagggtccgcacagtggttgcaggaaatggaaagcgtataagcaaatacgttattgctgaccccaccctgcccggtcgggatgaaacttccgcccttgacttcatagacgcggcggaaacgacggcctacttccagattgtttttgtctttgcaggccacctggcaggctttacaaccggagcagcgtgaggagtcgatgaaaaatcccagttgtttatcgctcaccggcgggtaatgtgtaaactgactcatgctttagccacctccaccagcatggtttgatgtgaatttcccttcgccagcgcggtaatacgggccgagctgaggacgttcgcacagccgcctttatcaacgccgttttcatccggctgccaccaggcgccagcctgcatcgcgacaacgccgggaataatgcgcggcgtcacttccgccgggatttcgcaaatcccgcgtgagttatgaatgcgcaccatgtcgccatgcgtaatgccgcgcttttgcgcatcctgcgggttgatccacaatgtctgctgctgcacttcaatcagccacgggttagcgtattgcgttgagttggcgcggttttttcctttccacgtaattaactggagcggaaaatctttcgccagcgcatcctccgggccttcatgcgcgggaacgtagtgcgataacgccgggatttccggatgctgcatgtcgtagaggcgcttcgagaagatctctattttccctgacggcgtcgggaacggatgattttccggatcgcgaatattgtcttcaaaggcgataaatggcgcgcttttgaacagatgctgacgggtcttttgcagcgtggcgaaatccggcagattttcgtccggcatcgccaggcgcgtctgttcccagatgtgttcaatccacgctttctcatcgcgcccctggctaaattcattctcaatgcctaatttcgccgccacctcacgtagccagtcgtagtcggagcgccgctcaaattcaggctcaatcagtttttcagagagtatcaggtagcttgccgtgccccaggtttcaccgatgttccagcgttccataaagctggtttccggcagcagtagatcagcgtatttcgcgctcggcgtcataaacagatcgctggcgacaataaactggatctttgattcatcctccagtacgcgtaccgcctggtgcagatcggggttctgattcgccagatagttcccggccagcgagaacagaatacggatgttactgtccagcttatcggcatctttcagccccatatccggcgtcactttgctggcgtcgtctgcggcctgcacccagttcatcaccgaaattttggcttttaccgggttatccggcatctccggacccgcggcgaatttacggttagcgcagccgccgtaacccgcagcccaaccgcctttgatgccgacattaccggtaatggtcgccagtagagtcgaaccgcgcgcggtgcgctcgccgcagttgtggcgctgtggtccccacccctgaatcaacgcggcgggtttggtattcgcgtaatcacgcgctaactggcgaatggtttgcgccggcacatgggtgatcttttccgcccactcgggggacttaacgacaccgtctttggcgccggtcagatacgccaccagcgattcgttagccggtacgccttccggcattgagtcttcatcaaaaccgatagcgtaacgcgcaataaatgcgcgatcgtgcagattctcgctgatgatgacgtacatcatcgcgtccatcagcgcattgtcggtggtgggcagcagcgggatccactgatccgccagcgacgaaacggtgtcggaatagcgcggatcaaccacgataaaccgcgtaccgttctgcttcatcttctgcaagaaatagttggtatgaccaaaaatggtctccgtcgggttatggccccacagaatcaccagtttggtgtccaaaagcgtatccagtgaactgccgctggcggcaatgccgtaagtataaggcgtcgcggccgccgtgttgcccatactcacagaatggtagctttcgagatatccgccggtcagattcaacaggcgacgtgccattttatcgccggaaaaggtgccgccggaaacggcggtaccaacatgaacatagcgcgaagccgggccatatttttcagtaatcgattttaaattatcggcgattaaggttgtcgcttcatcccaggaaattcgctcaaattttccttcaccgcgttttcctacgcgcttcatgggatatttaagtctgtcaggatgataaacaaatttacggtatgcgcgtccacgaacacaggcacgcatcaccggcatttgcgcatccagcgcattatccggtcgcgttgaaattcgcgtcacgataccgtcactaacatgcgcccgaatatcgcatttgcccccgcagtcaaaagtgctgcatgtctgaacgactttttccgcaggcctgttttcagttgccgtcacagcgcgcgcctgagcggtagctggcgaggagacaaacggtaacgcaataagcgcggagctggcctggataaagtggcggcgagaaatagcgggctgttcgccatttccctggctttttatatttttcatgatccgactcgtcaaataaaaacccattctcacgtttttatgcgctggttctcttgatatttatcaagctccctcattaagggtaattccggaaaaattaataattctcattaactttaaattaaatgaaattcataatttattctgaagagttgttaacgtattaattcaaaattaaccgctgcaacctgaccggactcatccattacgacaagttgataacgtccagcgatattgagtaataaagaaaggcgattattttcgccattaacaggttcgccatttaaaaaccaccagcgacgccctttgccgccggtagtcgagacgggcagcgtgacgttttcctggcctggcaattgcctgatcaccgcgccatccctcactcctgacagcattaacggcgcggcgtcattgccctgtagcggcggacagtggtcggacgccgcgggcaagcgggcgctacgtctttccgcaggcggcagccacggctccagcggccgcggccagacgataaacgtatgcgcacgcgcctgcggacagtcggcagcgacacgccgccccgtatcatccagccagaccgggaaacgaataccgttgatgtcttcctgctcaggtaacagcagcgtgggcggctggctgtcatcgagcagccatgtcgccagtcggcggcgacagttgctgtctccggcaggcagagtctgtccgcccggccagcaaatgacgccgcggcttaccgcctgcggacgcggatcttccggcaggcgtcccgtatgcgccagtaacagattattgacctggttaagcaatggcaccgcgctggcaaaaccaaattgccccaccacaggcgtgccgtcgggtctgcctgtccagataccgatgatatagcgcgcgttaacgccaatagcccacgcatcgcgatagccgtaactggtgccggttttccacgccaacggcacaatgcgcggcagcgcgttatccggcaagggttgcgcttcatccgccataatccgtcgaatgatccacgccgctcccggcgacattaatggtctttccgacagcggatcgtccggctgtaaccgtagtttcgccgctttcccatgacgagcgaacgcgctgtatgccgccgccatctcgtcaagccgcgcgcccgcgccgcccagaatcagcgaaagattgggcgccgcgccagcaggcaaatatagcggcaggccgacgttacgcagttttgccgcaaatcgtttcggcccataggcttcaagcacctgaacggctggcagattcagcgagcgtaccagcgcgtcgctcatgctgaccgggccgtgaaatccgctgtcgaagtttcccgggcggtaatctccggtacggcgcggaacgtcctgtaataatgatgcgggatggatcaagccgtcatccagcgccagaccatacacaaagggtttgagtaccgatcccggcgatcggatcgccgttaccatgtcgacatgaccaaaacggctgtcgtcattaaggtctaccgatcctacccagccgcgcacgctcatatcggtatgatcgacgacgatcatcgccaacgaactgcgtgcaggcagccgccctttccatgcccgcgccagatcttccagttgccgctgcaacccggcgtccagcgtggtcacaattttgtcgttctggcttttactcaacatcattcgggcaaaaagcggcgccagttgcggcatttgacgcggcgccagccagaccggttcttcacgcgactcgcgtaccgtttcggcaggccagacgccctgcgccgccatccgatccagcactttatttcgtgccgcttcggctctcgcaggccagcggtcggggcgtaaccggctcggcgcctgcggcaatacggccagcagcgccgcgtcagcgtagctcaggcgcgcgggcggcttgccgaagtaggcccagcttgcagcgccaataccctgtagcgtgccgccgaacggcgcgcggttcaggtacagcgtcaggatatcgcgcttggacaaatgccattcaagctggagggcgcgccaaagctggcggattttaccgccgaacgtgcgcgaatgcgggtccagcagtctcgccacctgcatagtcagcgtactgccgccggaaataacgcgcccggcggtaagatcctgccatgccgcgcgcgcgacggagaaagggttaacgccagggtgccgccagaaccagcgatcttcgtaattgattagggcctccaggtagcggggagagacctcttcaatcgtcaccggataacgccagatccccccggcgtcggcaaagcgccacagcggcgtaccgtcatgggctaccacgacccgcgcaggatggacctcattgagcggcagcggccagagtttatccgctgcccataacgccaggaaaataaaaagcggcgcgcccgccagccacagccagcggccacgtttaccacgccaaccgttcatttaaggcgtcacaatcagcagcccctcgctcgcgccggttgcccgccactgaggcgcatacatcgattccacctgcggttgcgcaagctggtacgtccccggcgttaccgcgcgcgccaggtagaccagcgtcacgggctggccctcattgacaacgacggcagccacaaaccgatcgtcgcggaattccatatactgaatatccgcctgctgcatctgattaagcagattttgcacttcgctaccgctctccggcaggctggcgctgctgtcagccagattctggttttccagctccagcccggccgggagcaggtccaccaccagcgcatccggcacattgcgatcggccactaccgttaaccagaccagcaccagttcgccgctacgcaacgaggacagcgatttacgctgaccatcggtccccagtatttgtcgttcaatctgcaaaacgttgctggcaggctcaggcgcagatgagggatagccgctgctatccagacgcagccatagcggctggctaccggtgttcgtcacctcaagggcggccagctggtcagcatccagattacgggtcagcgccttgtcgcccgacagcggctgcgcctctaacgaggtctgcacctgccaggcgcccgcgctggcctgtcgcgaatgcgcggcgaggaacaaggcattgttctcctgggtagagagccagcgctgaccgaaggcctgctcagaaagcgagcttaatagcgcgttttgcgcgtccggtctgaggttgttctcttccagtagcgacaacatcagagcgttatcgcgcagagaactgccgtaatccgctatccattgccgttcgtcctgacgcggcgtattcagagccagcgtaatggcctcttcgccgcgtctggcatcacccatcgtgtttaacgcgatgcccaattgcatcagcggcagtcctgaagccgcctgactacggcgctcccagatttcgcgcagcgtgccgagcggcgctttctgctgacgcgccagtaccagcgcagcgtaagcctgagcggcaaaagtactggcctgagtattatcgctataacgaatcagcatcgtaccgggatcctgcagatagcgcagcagtcgctcattgccccggttaatggcctccggcgggacgctatatccctgctcgcccgcgcgaataaggaaatccatcgcgtaggccgttagccagggctcttccgccccattttcatcccatagcgcaaaaccgccgttatcacgctgcatctgtagtatccgggagatgccgatatctaccgcagcgcgccgtttttcatcgctatcgccggtaataccgagcgactgcaattgagcggcattggtatacagcgccgggaataacccactggtggtttgttccaggcacccgtacggatatgctttcagctcgcgaatgtagcgcgccagattgagcggcggttttccgcttaacagcagttgtccctgtaacgtggctggcgagatgtttgccagatgctgctctggtacatgccagctctctcccggagccagcgcaatgccgctatttaccgtttgggcaggccaggccggacgcacgccgatttgccactgcttatgctgcgcgtcgagggtttctcccggcagattcagaccgctaatggtcgcctggatttcgccttcgccaaaaccttccagcgcgcgtaccggaacgaataaggtggtgcgcacgcccggcgccaggttgaccggttgcggctgctggctaagcagttccagtaacccactggcggcgagcgcaatattcagcgtctgcggacggtcggtcagattggtgacgtccagcaccagtcgcgaaacatcccctcccgccagaaaacgcggcatattcagctcggcaatcactggcgcggcgacaacgactttgctttcgccgcgaccaaaatcgtccgctgtccatgcctgcgccataacccgcagttcgccgttaaagtcgccaatcggcagcgttacgaccccttcgccctgctcattgagcgtgatcggctgcgcctgctgcgcgatgatattgacatggtttaccggcggttttccgccgcgcttaaggtcgtcgccatcgccgccaaaacgcaacgccgccagccgcccctgcccttcaatgacctggccgtaaatatcgtagatatccgcaccgtagcgtttttgaccgaagaacgcctgccacgggtccggcgtcgcgtaatcggtgatgttcaatacgccgctatcgaccgcggagaccagcacgttgatctgttttggcatttcgccgtgtttaacgctggctttaaccctgacggtgagcggctgattcgggcgcattttagccgggctttccagcgccagatcgaggcggcggttgtcatcccccagcggtagatgtagtaaccccacggcgcgttttggcgtcgcggaacgagatttatcgccgggacgcaccaccagcgtactgagatagagatcgtggcgattccaggttttatccaccggaatcgtgagctccagcccctgcgccggcacgtcgatcgcctgccaccacagcggaccatcgctggactccaccatcgcataacctttaccggcgaccggcgcggcgatatgcaatttcatggtatcgcctggacgataattcgctttatccagtttgagggtgacgcgatccggacgcgccgcgccgctaccgtcgctgttatcctgccagctatagccggcccagaaacgaacgctgctgaccgtctcattcggcgctttgacctccagacggtacgcgccccattccaccgggaagctgacttttccggtttcatccgcgttcagatccagcgtctgctcgccctccaccagatctttttgatcaaactgcgactgccagccttcgctttccgaccagttccagtaatagtcgcgacgctcgcggatgagccgcacctgtaaaccggacaccgcttttttctcgccctgcgcgttggcgtaaacaatatcgaatgcggcgttgctgtcttcgtcgacaatcggttgattaacggtggtatccgtacggtagtcgtataccgctttggcggcgaactgtggacgaattcccggtaacgtatcggcaggccaaatcgcctgctctacgcgacgagtgaccggacgaccgccagactccagcaggctggcctgtagaattacctgcagcggcgaatgcgcttcttgccactggctggcagcactcacttcaccacgtccgcctttatccaacgtcagttgaacttcgtccaggctgcgcgaaagattctcttcggcaatattgccgaactggaagccaggcaacgccgcgacagcgtcgcgcaggggacgcaggaaaagttgcccttgcagggtattgccgttagcaggcgcgccatacaagtaatagccgacaacggagaatttcacctcatccgcaggcgccagcggtgttttttgcgccgtcaggttgagcgccatccgctccggcataaagtcttccacgtggaaatcccaactccgcagcaaattatcgccggtgttggcgcggacatgccacaagccggtcggcgcgttgatatccagcggataattcaaacggtatagcccgttttccggctggctgacgacggtacgcatcacctgtccgtctggttttaccacttccagcttaacgggttgatcgggcagcgttttaccgtcgctatcgcgcagtaatccgttgaggataaccgtttcgcccgggcggtagagatcgcgcgggccgaacataaagaactgcttgctgtagccgggcgcgccagcgacattaaattccgacagatccagagccggaagcgtgagatcgagcagcgtggtctgctcctctttacgcgccagtaatagcgccgccgctttatcagcctccagttgcacatgtccctgcgcgtcgctcgtcgcctgcgccagcgtctgccctttatcattcagaagaacgatctcaattcccgactgcgccgcgccgttttccaggctttgcgtaaagatatccagccgattatggtaacggtgcgcggacacgccgatatcgctaagggtaaacaacgtagcggcattactatagttgtagtgtccagcctgattcattaccgccacatatacgcccgcctgttgcagcggcttaatatcgcttaatggcagcagcagtttctcacgcgtattgcgcgccggattaagatcaaaacgaccggtataaaccagatccgccattttcagcagattgtcggactcccagttagagagagaactacggtactcccactggctgacaaatgacgccagcgatccgggcttaacgcggaaaaagttcacatcaacgtggttgacgttaagcgccatgaccggcagtccttccgcgattttccccggtagcagcgatccccggctggcaaagccgacgctgggctggacatcacgcgtggtaatcgttttttcataagacttgccgaaggtggcgttattcagcgccttaacggcgggatcaaccgtgaccaccagcacgcgctcaggttccagatgacgtaaccttagctcttttaaatttggcgccagctcccatgcgccgtcaacgctgccgcttttcttatcaaccacgtgaaccacacgggagaaatcctgttcaggatctaaaggaattgaaaacgtcagcaccagcgtcgccgcgccgtcgagctgcgcttcggaggcgtctaatagcgtgagcgctttgccctggctttgctgcgccagcttttgtagctgtgccgggtcttgcgcgggcgagggctgcgctacggctggcgcttcgcttttagtcgtcggggcggttttatcgttgttatcgcatcccgccagcgccagcatgatcatgcaggccaccacgcgtaaatgtttcatctttcatccctggccttaacggcctgtcagcaacggttgatgagatattatgcgcgagaaattttattgtgtaagtccgtattactgtgatgatgcgaaaattttacgcagaaatgtggtttcgccagccaaaacagcctcttctacttgtcccttttcgggaaacgtccgacaatttgaccataatcaggtaacaatggagatgcccatgaccaccgccttttttgtcgccgccgactggcttgccgaacatattgatgatccggaaatacagattcttgacgcccgtatggcgccgccaggacaggaacatcgtgatatggcgggcgaatatcgcgccggacatattcccggtgcgctgttttttgatattgaagcgctctccgatcgcgcatcgccgttgccgcatatgatgccgcgcccggaagcgtttgcggtagccatgcgtgaactgggtgttcgtcaggataaacacctggtcatatacgatgaaggcaatctgttctccgctccgcgggcatggtggatgctgcgcacgttcggtgccgagaaagtgtccattctggcgggcggactggcgggctggcagcgcgacgaatggctattgcgcgaaggcgaggaagcgcatgaaggaggcgagtttgaggcgaaattcgcgccgcaagccgtggtgcgtctcaccgacgtattgctggcaagtcatgaaaaaaccgcgcaaatcgttgacgcgcgtccggcggcgcgttttaacgctcaggctgatgaaccgcgtccgggactgaggcgcggacacattcctggcgcgctaaacgtcccgtggacggaactggtgtatgagggcgaattaaagaccactgacgaactgaatgaggtttttttcagccacggcgtgagtttcgacagaccgattatcgccagctgcggttccggcgtgacggccgcggtcgtggtgctggcgctcgccacgctggatgtgcctgacgtcacgctttacgacggcgcgtggagcgaatggggcgcgcgtaccgatttaccggttgaacccgcttaatatccgccatgccggatggcgctcacgcttatccggcctaccgttcaggctgatgtaaaacgatctacagacattgtttttattccgctcttttccgctgtcctgcaaacgggcattattttctcttaataaaatcctattttttatcggtaaatactttacgtccggtataaggagtatcattaccgctgtttttgttttcaccggaaaataactcctgtaaatataattttttaaggatggaaaatggatatttcactcactaatttaattgagttggttaaaaaggttaaccgtaataaggtacctactcctatgtctgccgaggaaataagtcgtctgcgagtgcgtaagtatcgcgatccgcaaaatacggaaaccactgagttacctgaaagcctgaaggcgctactggcctacgaccgcgatctcctgagcaattataatatgcctgtgattgaaacattacaaaaatctattgataacgagggagtaattcattcttactcccctgatgaagaggcgtattacggcgttggcatggatagctcaggtattgatattgaagatctgatgcctgtctggagtaacgatccccgtcttccggcattaattcgtatcgatcatgtcggcgatcaggccatttttatctatatcacagaacgggatgccaacggcgaataccctattgcccgcatggaacgtaatgaattctggctggcggagtcttccctggtggaatatctctataatattatttcgggcgctaaagacattggctttaccgaagaggatttacatcttccgcaatggaaggcacagcaaaaaatgaatgaacaacgcgatgccgctttacttgacctggaggattatcatgaggcgttttgggcaaaactggacgcgctcgtcgattaatcgacatgatgtcgggtggcgctcacgcttatccggcctaccgttcaggctgatttaaagcgaatctacataaattctgtttaagcaggccacaaaaaaaccgctcaattgagcggtttttttgtgctggtccggttcgcggcctttccagcaggctttgttgccatagcaacgcaggcacaccgtaggggattaatactcccttttaagggagcaaatgtcaatatgatttaccgggaaactattcaatatttgaggtattatctttcccggccctttccgccgtctcgcaaacgggcgctggcttcaggagaggataacccatggccgtaagcgcaggcacaccgtagtgcctgctatcacggcattatcgccagcggtgctgccgtgatgcggtcttcgcaaggaccgcaacatgaaggtacgatgcttttgtgtcgtgcttcttgtttctggcacgttgtgtcttcacgcagacagaagctacccaggtaattctgttcccgtaacgctcaacgtccagagcaggtaagccaggaggccgccctgttgggcggctttcttttcttcagatgatgcggttctgtttaaaatcgcgcaggaacccgccccagcggcgctcgtagaacggcgcgatatgctcggtgataaagtggctgataccctgctcgcccttcctcacctgacaaatatcgatcggttcgtcacccggtaacgtgtcggtcgccacattgcccgctgcgtgaatgatctcttcaatttcgccgtcagcctcaatgccaatcagcagattgggttgggcgtccgcatgttctttaatcgcgcagagaaacgcgcgtttcaccggtttgatggttttaaacagcgtagtgagggaatcaatcatctgcgacggcggctcggccacttcggatagaataagcgactcgccgccttccagcacttcctgcgtacttaacggactgccttcctcagcgagaagcaggctgatttcacgcggcataaactctttgccggtcggcaatttagcgttgaggaatagcgtttcgccaagcgtcatttcaaacagcgtgcgcgccggcatcaccacaaacgcctgttcgtcttccacggcctgctgcagcgcctccagagaagtaaagaagggaatgacggtcgtgccgtcttctttttcccagtgctgcaaatccagagcgctgtcttccacaatcgcctcgccttcggcagcgctgcccggcacccagacggtggactccagtaaggtacggaaaaatgccggacgatgcgcgggctcagtcgccgctttctccagcaagatttctaattcatttttagtttcggacataggaatcacaaattatgtatatgggttgtaggcctgataagacgcacggcgtcgccatcaggcaaaatgccgggtggcgcttcgcttacccggcctacaaaaacaccgttcaggcggtcagcaaattcgcgatggtgcgcacacccagaccggttgccccggcagcccactgctcaaccggcgctttgcgataagtggcggaacagtcaatgtgcagccagccttcgcggtaattttcaacaaagtgcgacaaaaaacccgcggcggtgcttgccccggcgggataagccgcgctgccggtgttgttcagttccgcaaagttagacggcagctggttacggtggaactccgccagcggcagacgccagaacggttcattttcttgcgccgcgctggtcaacaagcgccccgccagcgtatcgtcaaaactgaatagcgcatggtagtcgttacccagcgctgttttcgccgcgccggttaacgtcgccatatcaatgattagctgcgggtgttgcgcgctggcgtcaatcaggccatccgccagtaccagtcgcccctccgcatcggtattcatgacttcgacattcttaccattacggtagcgaataatatcgcccagtttaaacgcattgccgctgatcagattatcggcgcagcacaggaacagttttacgcgtttattcaacccacgggtaatggcgaacgccagcgcgcccgttactgtcgccgcgccgcccatatcggatttcattgagtccataaaagcgctttgtttgatactgtagccgccggagtcaaaggtgatacctttaccgaccaggcaggcataaaccggcgcatctttgtctcccgtcgggttgtaatccagcgccagcagcaccggcggacgctcagaaccacggcctacggtatgcaaccccatatagttctgctcgcgcagatcttcgcctttggtgatacggtaagtgacgctatcgcacgcgacgctgcacagcagatccactgcgcgctgcgccagttgctccggcccaagctcttccgccggagcattaatggtgtcgcgcacccagtcaataatggtcaggcggttatccagctcctgacgttgggcatcgtctaaatccggccacattacggtacggacgccttttggtcctttgtaacccgcccagaatgcccaacaacgctcggtatcccatccttcgcctgtcagcgcgacctgttttattcccaggccgtcgattttacgcgccgcacgctggatcaatcccagatcgtctttaccgttaagatgcaaggtaataccgtcgttattaatactgtaagtggctttatcgccccagcgcgcatcggcaggctgcgtggaaagcgtaattttcatggcttctgtcattgttattttccttattagcaaacgggccgccgtagggcagcccgttagatcttttgctaaatgattcgcgttgcaggaaggcggcaagtgagcgacaaattcgtcgggaacgaatttgcacagccaaaggctgcctctggtgagggacaaggatgtccctcatcatccccgggagcatagcaaactatgtgactggggtgagcgaacgtagccaacgcacctgcggcgaggatcatgacgcaaaaattactctgcttcatccaaccagactagcagaatcgcctccagaattttttcattggatgcgttagggtcgtcgtcaaaatcgtccagttcgcagatccactgatgcagatcggtgaaacgaacggttttaggatcgacatcaggatatgcgtcgtataacgcttcgccgatctcgcggctatcggtccacttgagtcccatactaccctctgttaatgctcacgcgcatggttgattgtgtaacgtggaatttcgataaccagatcgtcgtcggtaacgcgggcctggcagctcagtcgactttccggctccagcccccacgctttatccagcatatcgtcttcttcttccgaactttccggcaaggagtcgaagccttcacgtacaatacagtgacaggtggtgcaggcgcacgatttctcacaggcgtgttcaatctcgatgccgttgcgcagcgcaacgtcaagaatggtttcaccggtctcagcttccagaactgcgccatccggacaaagatcctgatgaggcagaataacaatcttcggcatgttaaacctcgtctacggaatggcctttcaacgcgcgacgaaccgactggtccatgcggcgagcggcaaattcctgggtttgtttatctacgtttttaatggcttgttctatggcgtcaacatcatcgccttgtgcgaccgcgcttaaatgtgcggcggcatcatcaatgcattgacgttctgcggcgcttaacagcgcggcgtcggcagttagcgcgccggtcaaactttccagcacgcgcgcggcttcgactttttgctccgccagcatacgcgctttcacgtcctgctcggcaaaactcatggaatccttgatcatcgaggcgatttcgccatcggtcaggccataggaaggtttgacctgaatggaggcctcgacgccggtggatttttccattgcggtgacgctcaacaggccatcggcgtctacctggaaggtcacgcgaatatgcgccccgcccgccggcagcggcggaatcccgcgcagcgcaaagcgcgccagcgagcggcagtcctgcaccagttcgcgttcgccctgcatcacatggatagacatcgcggtctggccgtctttgaaggtggtgaaatcctgcgcgcgcgccaccgggatagtggtgttgcgcggaatgactttttccaccaggccgcccatcgtttccagcccaagagagagtggaatcacgtccagcagcagcatttcgctgtccggcttgttgccgaccagaatatcggcctgaatcgctgcgccaatagcgaccactttatccgggtcaatagcggttaacggcgtgcggccaaaaaattcgcccacccgctcacgcaccagcggtacacgggtcgaaccgccgaccatgaccacttccagaacgtcctggggctcaacgccggcatctttcaatgcgcgacggcaggccaatagcgtgcgcttaaccagcgcggaaatgagatcgttaaactgctcgcgagtgatctccccctgccagcccgcaacgttaacgcgaacggtatcggcatcgcttaaggcgattttcgccgcaatcgcggcatccagcagttcgcgctgaacgcgattgtcgctacgatcggcaattcccgcctgctcacgaatatagtccgccagcagatggtcaaagtcgtcgccgccgagcgcagaatcaccgcccgtcgccagcacttcaaacaccccgcggctcaggcgtaaaatagagatatcgaaggtaccgccgccgagatcgtaaacagcaataacgccttctttgcctgagtccagaccgtaggcaatcgccgccgccgtcggttcgttgagcaggcgcagcacatgcaggcctgccagccgcgcggcgtctttcgttccctgacgttgggcatcatcgaaataggcgggaacggtaatcaccacgccatccagctcgccggagagcgattcgctagcccgcgcggccagcgctttgagaatatcagccgatacgcgcaccggattgagcaatccagccgccgtgtcaatcatcggcagcccattaacgcttgccttaaaccggtaaggcagatgcggatagcgcgtctggatatccgccagcgagcgtcccatcatgcgtttcacagagctgatagtgttggccgtatcctgcgcggcattgtcacgcgcagcgtaaccgaccgtatggccctgctgctgatagtgaaccactgaaggcaacaggtggcgcccttcgtggtcaggcagagtttccgcctggccgctgcgaaccgtcgcaaccagagagttggtagtgcctaagtcgatgcccgccgccagacgacgctgatgcggcgcggcgctcagaccaggctcactaatttgtaataaggccatgttagattccagttaaaaatcgagcagcttttcttcgagttgttctgcgctgcttcgcagtttatcgagaaaccgcagtttgcgcaccgtatccgccgccgcgtcccacgcggcgttgtccaactgttccaccatttgctgaagacgagcatcaaacatcttttgtacgcgtttgatgaagctttccagccgcgcgtcgtcttttgattgttcgatatcgtccagctcttcgcgaagcgtgagttgttccatcagaaacgcggtgtcgcgtaccgtatgttgctcgctggccagatcgaacccgtgtaaggaaagcagatactccgcgcgcgtcaaagggtgacgcagcgtttgccaggcctggttgatcgtggcggattgctggacggcggcaagctgctgcgcctgagtgccgttggcaaatttgtcagggtgatactggcgttgcagatcctgaaaacgaaggctcagcgcctgggtgtcaatctgataacgggctggtaagccaaagagggtgaagtaatccataacattctcagggatagcctgtcagaacaaaccccacacgcaggcgaccacggtggggttataccttcttacttcgcgccgcagatgcgttgtctgcgcgggttcccccagtcatttactcaagtaagcgccaggggattcactcgcttgccgcttttctacagcacgaatgctcggtataacagcggaacacggttacacgtggaagctttcgccgcaaccacactcatctttcacattcgggttggagaatttaaacccttcgttcagaccttcttttacgaagtccagctgtgtaccgtccagaaattgcaggctcttgccgtcaaccactaccttaacgcctttgtcttcaaacacggtgtcttccgccgttggctcgtcaacaaattccagtacataagccatacctgagcagccggaggttctcacgcccagacgcagaccaaaccctttaccacggttggccaggaaggtattaactcgcgctgctgcactgtcgctaagtgtaatcgacataacaaaacctcaatgttaacgttctattttatttcgcttcgcgtttgcttttgtaatccgcaatagcggctttaatcgcgtcttccgccagaatagagcagtgaattttcaccggcggcagttccagttcgtctgcaatgtcggtgtttttaatcgcctgcgcttcgtccagggatttccctttcacccactccgttaccagagaactggaggcgatagcggaaccgcagccgtaagtcttgaagcgcgcgtcttcaatgataccttcatcgttaactttaatctgcaacttcatgacgtcgccgcaggccggcgcgccaaccatgccgcttcccacgttatcgtcgttgttgtcaaacgaccctacgttacgcgggttctcatagtgatcgattactttttcgctgtaagccattataaattctcctgattccgataccgattaatgatgtgcccattcgatgctgttcagatccacaccctgcttgtacatttcccacagtggagaaaggtcacgcagacggccaatggatttacgaaccagatcaatggtgtagtcgatctcttcttcagtggtaaaacgacctaaagagaaacggatagagctatgcgccagttcgtcattcatgcccaacgcacgcagcacgtaggacggttccagactggcggaggtgcaggcggaaccggaagagaccgccaggtctttcagcgccatgatcagcgactcgccttcaacgtagttaaagctcacgttgagaatgtttggcgcgccctgctcaaggtcgccgttcaggtaaacttcttcaatatctttgatgccgttccacagacggttacgcagaccgcgcagacgggccatttcggtctccatctcttctttcgcgatacggtaagcttcgcccatgccgacaatctggtggacaggcagagtaccagagcgcataccgcgttcgtgcccgccgccatgcatctgcgcttcaatgcgaatacgcggcttacgacgcacatacagcgcgccaatgcctttcggaccataaattttatgaccggagaaggacatcagatccactttcagttggctcagatcgataggcagtttgcccacgctctgggtggcatcaacgtggtagatgataccgcgcgcgcggcacatttcgccgatggtcgcgatatcctgcaccacgccgatttcgttgttcacgtgcatgatggaaaccagaatggtgtcgtcacgcatcgctgcttcgagctcgttgagatcgatgatgccgttgcgctgcggcgccaggtaggtcacttcaaacccttcgcgctcaagctgacggcaggtgtccagcaccgctttgtgctcggtcttgctggtgatgatgtgcttgccttttttctgataaaagttggcagcgcctttaatcgccaggttatcagactccgtcgcccctgaggtaaagacgatttcacgcgggtcggcgccgaccagttcagcaatctggttgcgggcgatatcgacggcttcttcagcctgccagccgaaacggtgtgaacgagacgccgggttcccaaaggttccgtccagggtcagaaactgcatcattttctcggcaacacgcgggtccaccggcgtggttgcggagtagtcgagataaatcggtaatttcattgctcttaaactccgtacatcactcaatgcaaggaatcaggcaaccggctggatgtacgaccgtgttgacgggacgtccgcgtcccggcctgattctgaattcttttttacgcttcatccttcagacgaccgcggcgttcaccgcatgaggccgccagaagagatggcgtaatattttaattaagcgcgtaatttaacgtcgatagcgtcctgcgcacgaccgctggcgcgcggcgcgtcatgcgtgtgctggcgaccagacacatccagaacttcctggttattcaccagctcgcctaaggtaatattgttgagaaaaccggtcaggcgatcgcttaaatcacgccacagcgcatgggtcaggcatttatcgccgccctggcagccgcctttgccctggcaacgggtcgcgtcaacggattcatcaaccgcgctgatcacttcgccgaccgcgatactgccagcatctttacccagcagataaccgccgcccggcccgcgtacgctggaaaccagaccgtttttacgtaaacgggaaaatagctgttccagataagaaagggaaatcccctgacgttcagaaatatcagccaacggtaccgggcccgcttcggagttgagcgcaacgtctaacattgcggtcacggcataacgccctttagatgtcagtctcatgtcttacttaacctcaaactcgcccctgcccggggttttttattgtaaaatgggggtattgcatagcagggacaagtctgacattcccgagtaatttggtcaactatttacttgagtaaattagtcaggtatttagcgttccgtgcgatattgacgcggttacttgcctttattctgctgctcaatagacgccagaatcccacgcagaatattcaactcctggctttccgggcgggcgcgggtaaacagacggcgcaatttattcatcacctgccccggatggttttcgcgaataaagccagtggagagcaacgtttgctccagatggccgtagaagcgttcaagatcgtccaccagcggatacggcgtctcttcatgatctgccgcgtcgccgttttcctgcgtcgccagccaggccatgcggacttcatacgcgatgacctgtaccgccatcgccagattcaacgagctgtactccgggttagcggcaatagcgacgtgataatggcatttttgcaactcatcgttagtcagcccgacacgctcacgaccaaaaaccagcgcaaccggcgtatttgccgcttccgccacgctttttaagccgcactcgcgcggatcaagcatcggccacggcaaagtgcgggaacgggcgctggtgccgaccaccaggctacagccagccaacgcttcatccagcgtatcgacgatctgcgcattaccgatcacatcgctggcgcctgccgccagggcgatggcctgggagtccggtttcaccaacgggtttaccagccacaggttagttaagcccatggttttcatagcgcgagccacagagcccatattgccggtgtgggaggtttccaccagcacaattcgaatgttttgcagcattgtctttcttcagctaaagattattctgacatcttaccataaaaccaagacagattccgatctcgctgctatactctgcgccgttttcccgttctttaacatccagtgagagagaccgatgcatccgatgctgaccatcgccgtgcgcgcagcgcgcaaggcgggtaatgtaattgccaaaaactatgaaactccggacgctgtagaagcgagccaaaaaggcagtaacgattttgtgaccaatgtagataaggccgctgaagcggtgattatcgacaccattcgcaaatcttacccgcaacacactattatcaccgaagaaagcggtgagcacgttggcacagatcaggatgttcaatgggttatcgatccgctggatggcaccaccaacttcatcaaacgtctgccacacttcgctgtttccattgctgtacgcattaaaggccgtactgaagtggctgtcgtgtacgatccgatgcgtaacgaactgttcaccgccacccgcggtcagggcgcgcaactgaacggctaccgtctgcgcggcagtaccgctcgcgatctggacggcactatcctcgctactggcttcccgttcaaagccaaacaatacgcgaccacctacattaatattatcggcaagctgttcaccgaatgcgccgatttccgccgcaccggttccgccgcgctggatctggcctatgtggctgcaggtcgtgtcgatggtttctttgaaattggccttcgtccgtgggatttcgccgcgggcgaactgctggttcgtgaagcgggcggtatcgtcagcgatttcaccggcggtcataactacatgatgaccggtaatatcgtggcggggaatccgcgcgtcgttaaagccatgctggcgaatatgcgcgacgaactgagcgatgcgctgaagcgctaagtctcttcggcggatggggccactcatccgccgtgccttttcaggcgtttttcctaaacacagcctcatcgctttacttgcctgcatgtttttgtacgatcgctccctgctccgctattggcataaagcggcaaggaagcgaacatgacccttcaacatacccgacgcatcgtcaaatccctttttattctgtttatcattgtggtctgtatttatctgctaccccgcgtagcgatcaatgccttttattacccggacaataaagtctatgggccaacccctgccgaagctgaatccattacctttaccgccaaagatggcacgcatctgcacggctggtttattcccactgctttcggcaggccggaaaacgccgtcgcgacggtgattcatgtccatggcaacgccggaaatatgtcggcgcactggccgttagtcagttggctgccagaacgcaacgtaaacctgtttatgtttgattaccgtggttttggcgaatctgagggcaccccatcacaagaggggctactggacgatacgaaaagcgcgatagattatgtgcggcatcgcgccgacgttaaccccgagcgcctggtactgctggggcagagcctgggcggcaataatgtactggccgccgtaggccactgcgtaggctgcgcaaatatgcgctacgccgaccaggcgggcatacgtgcgattatccttgactcaacgtttttatcctattcctccatcgccaaccagatgatcccgggcagcggctatttgcttgatgaccgctatagcgcggatcgcaatattgccagcgtcagccccattccggtattgattcttcatggcacggcagaccatgttattccctggcaggacagtgagaaattgtatgccctcgcccgggagcccaaacaaaaaatcttcattcctgacggcgatcacattgatgctttttccggacgttatgcaaacctttaccgtgatgcaatgattaaatttattcagaccgcgctatccgctaaatagcgcgacgctgtatatatgcatattttatgattaagaatatatttattataccgatagtaaaaaccattttttcccgttagcgaaggcggtggattagcgctagcgtaacagtaatattcaactgatttttataacaatttattttcatttgtttttcctgaatattactgtggagtatgtgatggctatcaaaattacgcctgacgagtttagtttgcttatccagcgattaaacaaaaaatggcgcgtgtttgccccgtccgcagagtttcgcggcggacgtttttccgacactgacaacattatttatcaacggattagcggctggcgcgatctcatctggcacgagaaatcgcacatgtcgccgaataccattatcgcccctatcaccgaaacgctcttttatttcgataaagacaccattcaaattgccgagacagacacttccccgataatcatctttgcccgcgcctgcgacattaacgccatgtcgcggctggattatatgtatttatcaaatgggaataattccgattacagttatcaactgctacgggagcatattcgtttcgtccttattgagtgtgaagaaagcttcgaaaattgtttctgcgtctcaatgggtaccaataaaactgactgttatagcgccgccatgcgttttagcgatgagggcgcgcttgtcagcatccgcgatccctttatcgaggcggcgatacaagggctggggcaggaggctgactataccccctctttcgtcagcgaaaaccgggaaaccgtcgtcacgccggacagcgtttgccacgatccgcaaaaaattcgcgacattctcacccaccatccgctatgggacgcctacgacagccgctgcatcagttgtggccgctgcactaccgggtgcccaacctgtacctgctatagcgtctttgacgtcgcctatgatgaaaatccgcagcgcggcgaacgccgtcgccagtgggcaagctgcatggtgccgggctttagcgacatggccggcggtcatggttttcgcgaaaaacccggcgagcgtctgcgctaccgcgccctgcataaggtcaatgactacaaagcgcgcaacggcattgaacatatgtgcgtcggctgcggccgctgcgacgatcgctgcccgcaatacatcaaattttctttgattatcaacaaaatgaccgctgccgttcggcaggcgctggcagaggaggcataacgcatgtcacattgttcctgtcatgataaaccgcagcacagtttgctgcctgcggcgtaccgcatcctcagtattactcgccacacgccgctggagtggaatttccgcgtggccgtcgattttcccgcgcactgggggcaatttgttgaggtgtcgctgccgcgcgtcggcgaagcgcccatctccgtttccgactacggcgacggctggatagatctgctgattcgtaatgtcggaaaagtgaccagcgccctctttacgctgaaagaaggcgacaacgtgtggctacgcggctgctatggcaatggctatccggtcgatacgctgcgccataagcccttactggttgtcgcaggcggtacgggcgtcgcgccggtgaaaggcttaatgcgctatttcgttgagaatccccaggaaattggtcaactggatatgattctcggctataaaaatcgcgattgcgtgctgtacaaagaagaaatggcgacgtggcgcggcaaacataatctggtactcacgctggatgaaggcgaggctgatgaccgttaccagattggccgggtgaccgatcggcttgccgacatgacgcttagcgatatcgacactatgcaggccatcgtcgttgggccgccaataatgattacctttaccgtaaaaatgctgctgcaaaaagggctcaagccggagcaaatctgggtggactacgaacgccggatggcctgctccgtcgggaagtgcggccactgccgtatgggcgaagtgtatgtctgcaccgacggtccgatatttaactacgccgtcgcgcaacgttttgccgattaaggagaacatcatgagcattgatattgatatcattaaagcccgtgcgaaaaacgaatatcgcctgtcaaaagtgcgcggcgaagccatgatcagcgtccgcattcccggcggtattttgcccgcgcatttgctaacggtggcgcgtgacatcgccgaaacctggggcaacggacaaattcacctcactacccgccagaagctggcgatgccgggtatccgttacgaagatatcgacaacgtgaacgctgcgctggagccgtttcttcgcgagattgaaatagaactgtgcgacgtccaggttgaggataccaaagcgggctatctcgctattggcgggcgaaatattgtcgcctgtcaggggaaccgcatttgccagaaagccaacactgacacgaccggtctgtcccgtcgtcttgaaaaactggtctatcccagcccttatcatctcaaaacggtcatcgtcggctgcccgaatgattgcgcgaaggcgtcaatggccgatctggggattattggcgtggcgaaaatgcgcttcactgccgatcgctgtatcggttgcggcgcctgcgtgaaggcctgtagtcaccacgcggtaggctgcctggcgctgaagaacggcaaagcggtcaaagaagagtccgcctgtatcggctgcggcgagtgcgtgctggcctgtccgacgctggcctggcaacgtaagccggatcagctctggcaagtccgtctgggcggacgcaccagtaaaaagacgccgcgcgtcggcaagctcttcctcaactgggtgactgaagatgtgataaagcaggtgatcgttaacctgtatgaatttgaaaaagagatgctcggcggaaaaccgatctatctacatatgggccatctgatcgacaaaggcggctacctgcgttttaaagaacgggtactgcgcggcgttcagctcaatccggaagcgatggtcgccgaacgcatttactgggccgaagacgaatccgtcgcgcggatgcatctcaaacccgccgggcactaatcaaccacgccatggccgcagcccgcccacaggctgcggcacgctaaaccacatgaccagcgccgcgacaagcagtatgccccctccagccagcgccagcgttgaccagcctacctgccgccataacgccggcgctttgtttccactgagtttcaccgccagagcacgaaaagtgtgtaccagcaacgccagcgaggtaatcgttagcgaggttcccgccgccatcgccagtaccgacgccattccccagctaaaaacgccaatcactttactgaataacagcaccattatcgcgccggaacagggccgcatccccatagacagtacgatcatgaatcgcgcgcgccagtcatcgccgctatgcaattgttcctgcgtcggtagatgctgatgtccgcagccgcatttttcatggtgaacatggcgcggcgtaaaagcgataaagacaggtttacgtagcagcgcgcgtaacctttttatggcccgccagcacagcaaaatgcccagcccgccaactaacgcatagctccccttttccagccagaagccgctcagatggagctgcctggccggaagttgcaatacggtcagcacgcccaccaccaacccgatagccacgagcccctgtaataacgcggcggcgagggttaacacgatactcgatttcaacttcgaaggatgcgtcgccagccatgtcgcgatcaccactttgccgtgtcccggccccagcgcatgaagcacgccatacataaaactcagcagaagcaacgatccgcccgcccgctcaggatgcgtcgccaccgcgttaagcagcgcgctcaactgctgattcacgtcccgctgccaaagagcgcttttcaacatcacctgcggccaggcctgccacatccacagaccgccaaccagcatcagcagcaggaataacgccaatggccacagcgagagccagcgccgccccggagtgcgttgagaaaaaattactgacattgcaaggtcaccgtttgggcaaactgtttacctaaatccatatcctccggcggcgcgtcctctttatccagcgactgggcgaaacgtagcgtctcttcgccgggcgcaggagtataaacctgaatccgacacttttcgcgcagcggttccggcatcgtgatatcgctgtcctggtcataatgcatatcgacataataagagggatcaaacgttgaaaaggtataagtctgtccgcttaacggctgcggttcagccagcggtagcgtaaaggtcaataccgcctgatgcgcgtcacgcgtcataccgtattctgtcggcctgtttttaaacttcactttcgcgccattgcgccacacttctgtaaagtagtgctgcccaagtacgttagccatcacttccgccgccaactttttccatatttctgaccccggtgccgcgtttccggcgtcatacagcagatctgcggacgtcagcgcgtccattgtccagcgcatttttaacgccacaaattgctcattttcactgaccacctgcgtttgcagacggatgaagctgtgcggatgcgccgccgccacgaaagataaaacggcaagaaatagtgttaaggcgctgcgtttcactggcttcatctgttcctcgcgataaaaattctgtgacactcctcagcattcctggcctaaaagcacgcttatcacatttttcacacgcaaactttagctatccttaccagacaaactaacgggagacctgacagatgatgccgacaattgccccaccatctgtactttccgctccccagcgccgctgtcaggtattgctgacgcttttccagccggagccaattgccacggtggaaatcttcagcgcgcttaatggcgttgatgatgatactgcccgtgaggatatcactgagacaagcctggagatccagcgctatcatcgccttgccatcacaacatgccagaacggttgctatcggatcgaaggtacagcactcgatcagcgcctttgccttttacactggctcaggcgcggcctgcgtttatgcccgaccttcgtcacgcaacagtttaccccggccttaaaaaacgcgctaaagcagcgcggtatcgcgcgtccgctgtatgacgatattaatctgcacgcgctcatcaatctgtgcgcccgccggttgcaaaaaccatttgaacatcgcgacgtgcagttcctgcgtctctttttacagtattgtctgctacaacaccatgccggcatcaccccggaattcaaccctgtgcagcagatttgggcgcagtcgtgcgcggaatatccactcgcccaggaaattggtcgtcactggcagcgccacgtgatgcaggccgcaccgctcaatgaagcgctgtttatggcgttactgttttcaatgattcgcctccccgacccgattcgcgacacgcatcaacgggcgcagcaactgcgactggaggtggcgcggctggtgctgcgctttcgagaaaaagggaacgtacgcttcagcgacgaacaagggcttaacgatcagctgtatgtccatctcgcccaggcgctgaaccgaagtttattcacgattggcatcgataatacgcttccggaagagtttaaccgtctttatccgcgtctggttcgcaccacacgtgaggcgctcgccggatttgaagccgaatatggtatccacttttccgaggaagagacggggctggtggcagtgattttcggcgcctggctaatgcaggataacgatttgcatgagagacagatcgtattgttagcggataaaaatgatgcgctggagacgcatattgagcagcaactgcgtgaactgaccctgttgccgctgaatatcagacggatatcgctccaggcgtttcaaaaagagggatgcccgcgcggcgtagcgctgattgttaccccttacgccacgccgctaccgctcttctcaccgccgttaattcatgcggatcgcgccctcacagagcaccaacagcagcagatccgcaagatcctggaatcatgacgcggcaaccactttgggccgaaggaagatagcgggcaatgccaccagcgccataatccagaatacgccgccgcccagatgttgatacagaaaaccggcaaataccgtcataatcgcgatactgccgcccatcgccacagcggaatagacggcctgcaaacgaatcacctcgcttccctgacgcgcagcgatatagcgcatggcggccagatggcaaacggtaaacgtgccacagtgcaggatttgtatcacaatcagccacggcaacgccgtactccagcccatcagtccccagcgtaccacgccgcacacagcggaaagcaacagcaagtcgcgggcgctaaaccggcggaatagctttttactcagggcgaaaatgatcacttccgccaccacgcccaacgaccataaatagccgaccgccgatgctgaatagccagccccctgccagtagatggcgctaaaaccgtagtaggcggcgtgcgccccttgcagcaaacagacgcaggcgagaaaacgccaactttgtgccaccagcgtacgccaggcgggccagcctgcgctctcctgctgacggctttccccttgcggcggcacgctgggacgtaacaacatacccagcaacatcgaggcgacgccgagcgtcagtagcgccagaatcgcctggtaatcgtataaactcaccagcttaccggtcagcgccgaccctatcacgaaggcgatggacccccacagccgcacccgaccatagtccagggtaatttgcttttgccaggtattggccagcgcatcggtcagcggcaccagtggcgaaaagaagaggttaaacccaaccatcaccaccattagccacgcgacatgcgttcctgcccaaaatgccagcgcaaataccagcgtcagcaatgccaggacgcgcagcgcggagatcaaccgcgaaggatcgcttacgcgaggcgcaatgagcagactaccgagaaaacgcgcgaccagacccacgcccagcagaagaccgatggtttccggcgttagcccaagacctttgagccagacgctccagaagggcagaaaaataccgtaactaaagaagtaggtgaaataactgagcgccagccagcgcgtggaatgcaatgccatgattccctcccgtttggaggcgatagtctggcggtaaacggttgcgctggcaagggtaacataaggttaacaggcggagggagaagttcaaacggcaacgccgccggataatgacttccggcggcgtcacgttatggcgcataagtaatgcccgacagacgcagcgccatcgggccattttcacaacacaagcgcttatgcgtaaaccgggaagcgtgcgcagatatccagcactttcgctttcacgcgttcaatggtggcttcatcattgatgttgtccagcacgtcacacatccagccagccagctctttcacttccgcttctttgaagccgcgacgagtaaccgccggagaaccaatacggataccggaggtcacgaacgggctcttaggatcgttcggcacgctgtttttgttcacggtgatgttagcacggcccagcgcggcgtcagcttctttaccggtcaggtttttatccaccaggtccagcaggaacaggtggttctcagtgccgccagacaccactttgtagccgcggttcaggaacacttccaccatcgctttggcgtttttcgccacctgctgctggtaaactttgaactccggctccatcgcttctttcagcgctaccgctttaccggcgatcacgtgcatcagcgggccgccctgcgcgcttgggaagacggcggagttcagttttttatacagctcttcatcgccgcccttcgccaggatcaggccgccgcgcggacccgccagggttttgtgggtggtggtggtgacaacgtgagcgtgcggaaccgggttcgggtaaacgcctgcggcaatcaggcccgccacgtgcgccatgtcgacaaacaggtatgcgccgatgctgtcagcgatttcacgcatttttgcccagtcaaccacgccggagtaggcagagaagccaccgataatcatcttcggcttgtgctctttggccagcttcgccatctcgtcatagtcaattttaccggactcatcgataccgtaaggtacgatgttgtacagtttaccggagaagttaaccggggagccgtgagtcaggtggccgccctgcgccaggttcatacccagaacggtatcgcccggctgcagcagcgcggtgtaaacagcgaagttagcctgagaaccggagtgcggctgcacgttagcgtagtcggcgccgaacagttctttcgcgcggtcgatagccagttgctctacgacatcaacgtattcgcaaccgccgtagtagcgcttgcccggataaccttcagcgtatttgttggtcagctgagacccctgcgcctgcatcacgcgcgggctggtgtagttttcggaggcgatcagttcgatgtgctcttcctgacgtactttttcctgctccatagcctgccacaattcggcatcataatcggcaatgttcatttcacgctttaacatccgcatctcctgactcagctaacaataaaatttgtgcctgaaaaggcagtccgtgggacttcggccaacagtataaccgaatcattcttcgataacaggtcttgacaaaggtttttacgcaaacgattacctatgcgtcagataagggtttcctgaacgagagtctgacgaatttcaacggatttcttttcagctttgtgatgcagatttttcacgttgttacctccataacgtaaagcagagaagatccatttacaatgcaagggtatttttataagatgcatttgatatacatcattagattttcacataaaggaagcacgtatgcttgacgcacaaaccatcgctacagtaaaggccaccattcccctgctggttgaaacaggaccgaaactgaccgcccacttctacgaccgtatgtttacgcataacccggagctcaaagaaatcttcaatatgagcaaccagcgtaacggcgatcagcgtgaagccctgtttaatgctatcgcggcctacgccagcaatatcgaaaatttaccggcgttgctgccggcggtagaaaaaatcgcgcagaagcacaccagcttccagattaagccggagcagtacaacatcgtcgggacacatctgctggcgacgctggacgaaatgttcaacccgggccaggaagtgctggacgcgtggggcaaagcctatggcgtactggctaacgtctttattcatcgggaagccgagatttatcacgagaacgccagcaaagacggcggctgggaaggcacgcgccccttccgcatcgttgcgaaaaccccgcgtagcgcactgatcaccagctttgagtttgaaccagtcgacggcggtacggtggcggaataccgtcccgggcagtatctgggcgtctggctgaagccggaaggttttgcgcatcaggagatccgccaatattcactgacccgtaaacccgatggcaaagggtaccgtattgccgtgaagcgtgaagacggcggccaggtatcaaactggttacaccatcacgccagcgtaggcgatggggtgcatctggctgcgccggcaggtgacttctttatgaatgtcgccgctgatacccccgtttcgctgatttccgctggcgtcggccagacgccgatgttagcgatgctcgatacgctggcgaaagaacagcataccgcgcaggtgaactggttccacgcggcggagaacggcgacgtccatgcgtttgccgacgaagtgagcgagctgggccgtacactgccgcgtttcactgcccatacctggtaccgcgagccgactgagtccgatcgcgcccaacgcctcttcgacagcgaagggctgatggatttaagcaaactggaagccgcgatcagcgatccagcaatgcagttctatctttgcggcccggtaggctttatgcagtttgccgcaaaacaactggtttcacttggcgtgaataacgaaaacattcattacgaatgcttcggcccgcataaagtgctgtaattgcaacaaatcctctgaaaaaacgggcgttatcgttaaggcgaacgcccgttttcctccccgttcccctgcttattgcgctgctttttatgcctttcttttacaaaaaaggggaataaaaaaagtctgtgcaaatcgtgttattattaacgtttgacttagctcgttagggcatctttttatgcagcaacctgttgtacgcattggagagtggctggttacaccttctgttaatcagatcagtcgtcagggacgccagattactcttgaaccacggctgatcgatcttctgatgtattttgcgcatcacccggatgaagtgttaagccgggataacattattgatcatgtctggatgcgcaccatcgtgaccaaccatgttgtcacccaaagcatttctgaactacgcaaatcattaagagatggcggagacagcaatgctgaatacatcgttaccgtacctaaacgcggctataagctgacggcgccggttatctggtgcgaagaaaatagcgatgagatcgataattcatcaacgtcgccgccgccgccgatcgcagcgacgaatgcagaaccgacggagggggttactgccgctacgcctgtgccgcccgcctctttgcaaacgccgactaaaaaggcgaaaaagccgcgtattgccgctttctggacgtgggtgatgttcctgctctcgctggcgacgctggtggtgtttatcgtgatgtcggtggtagatcataatgccgcggtaacaaaaacgcggttattacttaacccacgagatatagatgttcgttttgaaggcggcaattcctgtaataactgggtctcgcaggagtcctacgccatcggtctgggcggcttaatcaccgacctgctgaacacctactcgacttttatggtgcacgataaaaccaattaccgggtcaatgagccaagcagctccggtaagacgttaaccattcagtttgtcaatcagcgccactatcgggcgcagcagtgctttatgtctgtagtgctcattgataacgccgatggttcaaccatgctggataagcgttatttcgtcaccaatactaaccagttgtccatccaggatgatctgtttaatagcctgtctttcgttttaacacagccctggcctaatcgtatgcgagaacaactggccctgttcagaacgccgcaaaataccgcactgatgcgtttttatgaggcgcgccagcttattctgagcggcgatgcgcaggcgctaggtaaagccagcgatattctgaatggcattattaaggaaacgcctgatttcaactatgcctatgaatataaagtgctggtagatgtattacggcaatcacagcagccgtttgataaagaacaagtggccgcactgaacgaagagtttaaaaaaatagatcaaattccgggcgttgagaaaacgtctgtttattataaaatcaagaccgtcgatctgttaggcaaaggtgatatcgatgcagcgtatgaggaaatcaataaaagcatcgagcttgaaatgtcgtggtttaactatgtcctgttggggaaagtttacgaaatgaaaggtgagaatcgtctggccgctgatgcctatctgaccgcctttaatttacgtccaggtgaaaacactctgtactggatcgagaacggcgtatttcagacatccgttcagaaaattgtcccttatctgaatagttttctggcagaagattaaatttaacgctgaaccatgacaaataaaagcgaaaagatattaaatttttcgcttttattttgtgaaaaacatgttgccaaaaatagcttatgttaattttggcaacatattcattgcaaagatatgtaaatataactctttgtaattaaacgatgtttatcctttaatgatattttccatgatatttatatgttaattcaaaaaaatcaatctatcagttttttcatgtttgtgtttatttcactttttctttaggacttatctcaacccattcgttaatcttgtcgacagttgaacgggcacgcagcatatatgaagcataagcccggttcttaaaaatacagctcaggagaaatgaacatgagttctgtcaaaaagatcgggctatttgcctgtactggcgtcgttgccggtaatatgatggggagcgggattgcattattacccgccaaccttgccagtattggtggcattgccatctggggctgggtaatttctattattggggcaatgtcgctggcttatgtttatgcgaggctggcaaccaaaaaccctcaacagggtggccctatcgcttatgctggggaaatatctccggcgtttggtttccagaccggcgttctttattatcacgcaaactggattggtaacttagccatcggtattaccgcggtttcttatctttctacgttcttcccggcattaaataatccaataccggcaggtattgcctgtattgctatcgtctggctgttcacctttattaatatgctgggtggggcctgggtcagccgcttgacaacgattggcctattcctggtgctgatcccggtagtcttgaccgcagtcgccggctggcattggttcgatatcgcgacctatcacgcgaactggaacacgtccacgacgaccgactctcacgccattgttaaaagtattctgctctgcctgtgggcgttcgttggcgttgagtctgccgccgtcagcaccggcatggtgaaaaacccgaaacgcaccgtaccgctggcaaccatgctgggtaccgcgctggcaggcatcatctatatcgctgcgactcaggttatcgccgggatgttcccagcttccgttatggcctcttccggcgcgccgttcgctatcagtacctccacgattctgggtggctgggctgcgccgctggtttccgcctttaccgctttcgcctgcctgacgtctctgggctcctggatgatgctggtcggccaggctggggttcgcgccgccaacgacggcaacttcccgaaaatttacggtgaaatggataaaaacggtattccgaaaaaaggtctgctgttggctgcggtgaaaatgacggcgctgatgattctgatcaccatcatgaactccagcggcggtaaagcgtccgacctgttcggcgaactgaccgggattgccgtactgcttaccatgctgccgtacttctactcctgtgttgacctgattcgcttcgaagggttcaacatccgtaactcggtaagcctgatttgttctgtactgggctgcgcattttgcttcatcgcactgatgggcgccagctccttcgaactctccggcacctttatcgtcagtctgatcatcctgatgttctacggtcgcaaaatgcaccagcgccagaacaacgacagcgacaacaatacggctgaagcgctttaaccgctaactcctttttctcaaagcccctttcgtcacctgctatagcgtagcgggaggggcccactttaccaggaacaagactatgaacgttattgctatcatgaaccacatgggcgtctactttaaagaagagcctattcgtgaactgcatcgtgcactggaaggtttaaatttccgtatcgtctatccaaacgaccgagaagacctgctgaagctgattgaaaataactcccgcctttgcggcgtcattttcgactgggataaatataaccttgagctttgcgaagagattagcaagctgaacgagtatatgccgctgtacgccttcgccaacagctactctacgctggacgtcagcctcaacgatctgagaatgcaggttcgcttctttgaatatgctttaggcgccgcagccgatatcgcggcgaaaattcgccagaataccgatgaatacatcgacaatattctgccgccgctgacaaaagcgctgttcaaatatgtgcgcgaagggaaatatactttctgtacgcctggccacatgggcgggaccgctttccagaaaagccccgtcggcagcatcttttatgatttcttcggcccgaacacgatgaaatccgatatttcgatttccgtttctgaactgggttcgctgctggaccactccggcccgcataaagaagcggaagagtatatcgcccgcgtctttaacgccgaacgtagctacatggtgacgaacggcacctctacggcgaacaaaatcgtcggtatgtactccgcgccggcaggcagcacggtactgattgaccgtaactgccataaatcgctgacccatctgatgatgatgagcgacattacgccgatttatttccgcccaacccgtaacgcctacggtattcttggcggtattccgcaaagcgagttccagcacgccactatcgctaaacgggtaaaagagacgcctaacgcaacctggccggtccatgctgttattactaactcaacctatgacggtctgttgtataacactgactacatcaagaaaactctggatgtgaagtccattcattttgactccgcctgggtgccttataccaatttctcccctatttatcagggtaaatgcggtatgagcggcgaccgtgtggaaggcaaaatcatttatgaaacccagtccacgcataaactgctggcggcgttttcacaggcatccatgattcatgttaaaggcgacattaacgaagaaacctttaacgaagcctacatgatgcataccaccacttctccgcactacggtatcgtagcgtctactgaaaccgcagcggcgatgatgaaaggtaatgcgggtaaacgcctgattaacggctctattgaacgtgcgattaaattccgtaaagaaattaaacgcctgaaaagcgaatctgacggctggttctttgacgtatggcagccggaacatatcgatggagctgagtgctggccgctgcgttcagatagcgcatggcatggcttcaaaaatatcgataacgaacacatgtacctcgacccgatcaaagtcactatcctgacgccggggatgaagaaagacggtacgatggatgagttcggtattccggcaagtctggtcgccaaatatctcgatgaacgcggcatcatcgtagaaaaaaccggtccatacaacctgctgttcctgttcagcattggtatcgacaaaaccaaagctctgagcctgctgcgcgcgctcactgaatttaaacgcgcctttgacctgaacctgcgcgtcaaaaacattctgccggcactgtaccgcgaagcgcctgagttttatgaaaatatgcgcatccaggaactggcgcagaatattcataaactggtcgaacatcataatctgccggacttaatgtaccgtgcgtttgaagtgctgccgaaaatggtgatgacgccgtatactgcgttccagaaagagctgcatggcgaaacggaagaggtgtatcttgaagagatggttggacgcgtcaacgccaacatgatccttccttaccctccgggagtgccgctggtgatgcctggtgaaatgatcaccgaggaaagccgtccggtactggaattcctgcaaatgctgtgcgaaatcggcgcccactatccgggcttcgaaaccgatatccacggcgcctatcgtcaggcagacggacgttacaccgttaaggtgctgaaagaaaatacgaaataagtaccaaagggaagtggcttgccacttcccttttttcacgcagcaaggagactttatgaaaacaccctcacaaccgcgcgcgattttttacatcgtggcgattcaaatttgggaatacttcagcttttacggcatgcgtgccttactcatcctttatcttacccaccagcttggttttaatgacagccacgcgatcaacctcttcagcgcctacgcctctttagtttacgttacccctattcttggcggctggcttgccgaccgcctgcttggcaaccgcgtggcggttatcaccggcgccctgttgatgacgctgggtcatgtggtattgggcttagaatctgattcaacgttgagtttatatgcggcgctggccattattatctgcggctacggcttgtttaaatccaatattagctgtctgctgggcgaactttacgcccctgatgacaaccgccgcgacgggggattctcgctgctctacgccgccgggaatattggatcgatagccgcgccgatcgcctgtggtctggcggcgcagtggtatggctggcatgtcggctttgcgctggcgggcgtgggaatgttcatcggcctgctcatctttttaagcggtcatcgccactttcagcagacgcgcggtgttaatcgccccgcgctgcgggcggttaaattcgcccttccaacctggggttggctggtattaatgctgtgtatcgcaccggtattcttcaccctcctgctggaaaataactggtctggctatgtgctggccattgtctgcgtcttcgcggcgcaacttatcgcccgtattatggttaaatttcccgaacaccgtcgcgccttgtggcaaatcgttctgttaatgatcaccggcactctcttctgggttctggcgcagcagggcggaagttcgatcagtttattcatcgaccgttttgtcaaccgccactggctaaacatgaccgtccccaccgcattgttccagtcggtcaatgcgattgcggtgatggcggcgggcgtggtgctggcgtggctgagcagcccgaaagagagcgcccgctcggtgctgcgcgtctggcttaaatttgccgtggggctggtattgatgggcggcggttttatgctgctggcgctaaacgcgcatcaggcccggttagacgggcaggcatcaatgggaatgatgatcgcagggctggcgctgatgggctttgcggaactgtttattgatccggtcgcgatggcgcaaattacccgcctcaacctgcctggcgtcacgggcgtactgaccggtatttatatgctggcgaccggcgcggtcgctaactggctggctggcgtggtcgcgcaacaaaccacggaatcgcaaattagtgatacggcggtagccgcctacggacactttttctcgcaaatgggcgagtggacgctaagttgcgtggcgctgatcgtcgccattgtcggcctgagatgggtttgcacccggactacatcggcgctaccgcagggcgattaaacggtggttcgctgcccacaaggaggagacgggcagcgaatcggcacatcagatagccgcgtcgtcttcttcgccagtacggatacgaataacgcgggcgacatcaaagacaaagatcttaccgtcgccgattttccccgtctgcgcggtacgaatgatggtatcaacacaggtatccacgatgtcgtcaggcacaacgatttcaatttttaccttcggcagaaaatccaccatatattccgcgccgcgatacagctcggtgtggcctttttgacggccaaaacctttgacttcagtgaccgtcatgccggtaatacctacctcggccagcgcttcacggacatcgtccagcttgaagggtttaataatcgcatcaatctttttcatgctattccttgaaaaggtcgcctgtgttttgatcggttaaacgtaacatatttcgcgctactttacggcatgaaaactactctttgaaatcattcgcatccagttcgtgacgggagagtagcttatagaattccgtgcggttgcgccccgccatccttgccgcgtgcgtcacgttacctttggtaatttgcagtaacttgcgcagatagttcagttcaaattggtttcgcgcttcggcaaaagttggcagcgcggtgttttcgccttccagcgcctgctcgaccaacgcatcgctgatcaccggcgaagaagttaacgccacgcattgttcaatgacgttgaccagttggcgcacgttgcccggccagcttgccgtcatcagccgtttcattgcatcagtagaaaaggcgcgaacaaacggtttatgccgctgtgccgactgtctgagcagatgattagccagcagcggaatatcctcggtacgctccgccagcgccggaattttcaggctcacgacattcagccggtagtacaaatcttcacgaaattcgccccgcgccatcgccttcggcagatcgcggtgcgtcgcggaaataattcgcacgtcgatatcaatatcgcgattgctgcccagcggcctgactttgcgctcctgtaacacccgcagcagcttcacctgtaacggcgcgggcatatcgccaatttcatccagaaacagcgtgccgccttccgccgcctggaacaacccttcacgattgctcactgcgccggtaaaggcgccgcgcgcatggccgaataattcggactccagcaactgttccggtaacgcgccgcagttaatggcgacaaacggcttgttactgcgcgggctggcattatgaatcgcctgtgcgaaaatctctttcccggtgccgctttgtccgttaatcaatacgctgacatccgactgcgcgaccatgcgcgcctgttcaagcagtcgcagcatcagcgggctacgggtaacgatagcgttgcgccagctatcgtccgtcgcgggagcggactgctccagcgcttcatctatcgctttatataacgcgtctctgtcgatcggcttcgtcaaaaagctgaatacgcctttctgggtagcggccaccgcatccggaatagaaccatgcgccgtcagaatgataaccggcattcccggctgtactttctgaatttctgtgaacagttgcataccatccatttcgtccatgcgcaggtcgcttattaccagatccactttttcccgatgtagtacccgtagtccttcctggccgctctctgcggtcacgacgctgtatccttcactggtcaggcgcataccgagcaatttcagtaatccgggatcgtcatcgaccagcagcaggtgcgccggtttacggcttatcatggcgttacctcatcttgtgacggcgacggcgccgcgccatcttcagacgtcgcgggtttgtcattcgtatgcggcgtatcggcgttgtaattccctgccggttttcgtgtcgaaagctggcgctcaatatcggttaaactctccagcttacgggtggtaagatcgagctgcgtttgcaaggcctgttgctgctggcgcagcgcatccagctcactatctgacatttgctggagtttgctataacgctgacgttcggcagaaagcgccagttgcagcgcctgaccgtcatgccagatttggtagacgggccgtacctgagccggtatttgcgcgcttaacgcctccagacgggtcactatggcgcgccgctccggcggcgtaatttttgcatccgccagtaaaatcccgcgcctgaaggcattttgccagttatcatccgtcaacgcgcgcgcctctgcgcgcgactgaaccggcatcagacgatcggcgcagtcaatcgtgcgtagccagtacagcggattcgtctccaccgcctgcccgcgtagcgaccagatatccgcgcacgccgtcgggagataatccgccagttgataatgggggagcgtgtcctgcgctgcgctaccgggcagttgctgtgaagcatggggaacacatgcggtcagcgccagacacgatatgcccaccggtattccccaccgcaaaaggcatcgtttaatagtttggacgaaaacgtgtgacatacgcaccaggcttaaattcatattagtgtttgtcagatgcaggcaatggcagcgagatgcgaaaacaaacttcctgcgcgttgtcatccaccagttggatctctccctgcattcgacgaatacaatctctggcgatactcagccctaacccactgccttttaccgccccttttcgctggtggcttccctggaaaaaaggctcaaaaatcatttctctttcggtttgcggaatcggctcgccgctattaaccacatcgatataaaccgtggagccctgagagcgactacggatacaaatgttaccggattcagcgccatagtgcaccgcgttggaatagagattatccagcacgctcatcagcaacatgggctctgctatgcagcgttcggcctccaggtcgacatcggtatgcatcattttagcgcgggcaggcaaactgtgggcggaaaccaccatatccacaagcggcgcgatatcgaccgcttccagctctgtggcactgtctaccagtttccggttgtaatcaagcaattgctcaatcaatttttgtaaattacgactgctgtcatccagaatatcgaccacctctttttgctccggcgtcagcggcccaaccacctgatcggccagcagctcagtcccctcgcgcatactggccagcggggttttcagctcatgggacaggtgacgtagaaactgatggcgctgggattccagccacgccagacgctcactcagccagataatgcgctgccccaccgatcgtaattcacgcggaccggtaaaggtgacggtattccccaaagaacggccttcgcccaggcgattaatcatccgttcaattcctttcaccggcccgataatcatgcgggtaaaaagtagcaccatcgccaggctcaccagaaatagcaccagcgcctgccagccgaaaaattgtccgcgctcggcgatttcttgttgtaactgctgcccgcgcgagtaaaccacggtacgcgtcgcctgcaccatttccgtattcgcgttggcaaaggcctccaggcgcgcggccgctgccgcttccgggccgctatctttacactgcaattgcgccagcgcgtttaaatcctggcgtaacgcctgatacaacttatcatccggcaagacgccggcatgggcgtccagcatatcgctatagcgcttacgctggctttgatacacttttgccagcgtcggatcgtcaagcacgcaatactgtcggtagcttcgctccatctccagcgcgacgttggtcatcgcctcgctgcgccgggcgtcaataagcgtgctgcggttagtcaccgcagcctgatcgcttaacgcgttaaggctttgccacgcctgccaggccagaaccagcaacggcagcaggatcagcaaaaaggccagcatgaccaattgtcgtaaagaacgggggaaaacagaccagcgcttcaacgtgtcgctcacataaaagaagaataaaaaagatgctaaccgagggaagcgccagatacaacaaagccgggctaaacccggctttgttatggaataaggcggtgcctaactcgacgtttcgcccggaggttgataaagctacgctgttatcagaagttggacggcaggcaccttgttgtgcgtcattcgaagtttatgtagcgcgtccctaaggggctgacataagaaggtgaatgagccactggttaccattatgcagtaattgtgccaacattcaaaagaatttgttaacataatgatagatatgaaaaatatcgttattcatgctaaaaatggctctgtctgttttttgccctttctgtcgccaatcagcaacacctgcaacacctaaaaataaaacaatttaaaatcaaatagttaaatgtctctttttggcgacaacctatcccccactcatgtcgggatttcccgacactttaatcttgcggcataagcgctagtttattgccggatggcggcgtaaacgccttatccggcctaccgcttgacgttcaagacggtagctacaaccgcgcttccccgtgggcctgataagcgccgtctacaaaaaagcccctcgtgaagaggggcttaatggctatcgggctaattaaccaagctgcttacgcgcattacggaagatacgcatccacgggctatcctcgccccagttttccgggtgccaggagttggcgacggtgcggaatacgcgttccggatgcggcatcataatcgtcacccgaccgttttcggtcgtcaccgccgtgatgccgttcggcgaaccgttcgggttagccggataggtttcggtcaccttaccaaagttatcaacgtagcgcagagcgaccaggcctttgctctcaagcgcggcaagatgcgcatcgtcacgcacctcaacgcgcccttccccatgggaaaccgcaatcggcatctgtgagcctaccattccttgcagcagcagcgatgggctttgcgtcacttctaccaggctgaagcgggcttcgaagcggtcagaatggttacgtacaaaacgcggccacagttcgctgcccgggatcagctcgcgcagattcgacatcatctggcaaccgttgcacacgcccagcgccagcgtctgcggacgatggaagaaggtttcgaattcgtcgcgcacccgatggttaaacagaatggatttcgcccagccttcgcccgcccccagcacgtcgccgtaggaaaagccgccgcaagccaccagcgcatggaagttacccagaccgatacgaccgcccagcaggtcgctcatatggacgtcaatcgcgtcaaagcccgcacgatggaacgccgccgccatctccacgtgagagttcaccccctgctcgcgcagtacagcgactttcggtcgtgcgcctgtcgcaatgtacggcgcggcgatatcttcattaatatcaaacgacagcttcacgttgaggcccggatcggtatcattcgctttcgcctcgtgttcctggtcggcacattgcggattgtcgcgcagacgctgcatctgccaggtggtttccgcccaccagacacgcagtgtagtgcggctttcgctgaataccgtctggtcattagcggtaatcacaaagcgatcgccagccagggcctgaccaaggtagtggacgcagtcagcaaggccgtactgcgccaatagcgcttcgaccgcgtctctgtcttcagcgcgtacctgaatcacgccgcccagctcctcgttgaacagtgcggccagatggtcatcgcccagcgcggcaatatcgacctgcacgccgcagtggccggcaaaggccatctcggccagcgtcaccagcagaccgccgtcggaacggtcgtgccaggccagtaatttacgcgcagcgaccagcgcctgcatggcgtcatagaagcctttcagttgcgcgacgtcacgcacgtccgcgggtttgtcgccaagctgacgatagacctgcgccaacgccgttgcgcccagcgcgttgtggcccttgccgagatcgatcagcagcaaggcgttatcttccgttgaaagctgcggcgtaagggtgtgacgcacgtcttccacgcgggcaaacgcggaaatcaccagcgacagcggcgaggtcatttcgcgctgttcgttgccttcctgccagcgggttttcatcgacatcgaatctttgcccaccggaatagtcaggccaagctgcggacagagttcctctcccaccgctttaaccgcgtcatataaaccggcatcttcgccaggatgaccggctgccgccatccagttagcggaaagcttaatgcgcttgatatcgccaatctgcgtcgcggcaatgttagtcaacgcttcaccgacggccagacgggcggaggcggcaaagtccagcagcgccaccggcgcgcgctcgccaatcgacatcgcttcgccgtagtagctgtcgaggctggcggtagtgaccgcgcagtcagccaccgggacctgccacgggccaaccatctggtcacgcgccaccataccggtgacggtacggtcgccaatagtgacaaggaaggttttttccgccacggtcggcagatgcagaacacgctttaccgcgtcggcaatcgtgatatccgcgcggttcagcgcatcgcctttcgccttcaatgtttgcacatcgcgggtcattttcggcgttttgcccagcaggacatccagcggcaggtcgatcggctgattgtcgaaatggttatcatgcaacgagagatgctgttcttcggtagcgtcgccaatgaccgcatacggcgcgcgttcgcgcttacacagttcatcgaacagcggcaactggtcagccgcgaccgccagcacatagcgctcctgggattcgttacaccagatttccagcgggctcatgcccggctcgtcgctaagaatgtcgcgcagttcgaatttcccgccgcgcccgccgtcgctcaccagctccggcatggcgttggagagaccgcccgcgcccacatcatggataaacaagattgggttagcgtcgcccaactgccagcagcggtcgatcacttcctggcagcggcgttccatttccgggttgtcgcgctgaacagaggcaaaatcgagatccgcatcagactggccggaagccattgacgatgccgcgccgccgccgaggccgatattcatcgccgggccgccaaggacgatcagcttcgcgcccacgacgatctcgcctttctgcacgtgatcggcgcgaatattaccgatcccgcccgccagcatgatcggcttatggtagccgcgcagctcttcgccgttgtggctgttcactttctcttcataagtacggaagtaaccggtcagcgccgggcgaccaaattcgttgttaaacgccgcgccgcccagcggaccttcggtcatgatatccagcgcggtgacaatacgttccggcttgccaaaatcctcttcccacggctgttcaaagcccggaatacgcaggttggaaacggagaagcccaccagcccggcttttggtttcgcgccacgcccggtggcgccttcatcacgaatttcgccgccggaaccggtcgccgcccccggccacggagagatggcggttgggtggttatgcgtttcgaccttcatcagaatgtgcgcgggctcctgatgaaaatcgtaacggccggtattgtggtcggcgaagtagcgccccaccgcagatccttccatcaccgcggcattgtctttataggcagagagcacatagtccggcgtggtttcgaaggtgtttttaatcattttaaacagcgacttcggctgcggtttaccgtcgataatccagtcggcgttaaaaatcttgtggcggcagtgctcggagttcgcctgggcgaacatgtacagttcgatatcgttcgggttgcgccccagtttggtaaacgcctcctgcaaatagtcgatttcatcttccgccagcgccagaccaagacgcaggttggcgtcaattaacgcctgacggccttctcccagcagatcgacactggaaaccggcgcaggctgatggtggataaacagtttttccgcatcggttaaagaagagaacaccgtctccatcatacggtcgtgcagctctgcggccacttgtcgccactgttccgccgtcaacgtcgaagcctcgatatagtacgctacgccgcgctccagacgatcaacctgttgcaggccgcagttgtgggcgatatccgttgcttttgaagaccagggggagatggtaccaggacgcggtgtgaccaacaggagtttacccgccggcgtatggctgctaagcgccgggccgtattgcagcagacgggtaagctgcgcctgctcgctatcatttaacggggcgttcaggtcagcaaaatggacatactcagcgtatatattgtggacctggaggttggcagcctgaaagcgcgccagcagtttattgatacggaatgcagacagtgcaggcgaaccacgcagaatttccatcataagtctctcgtcttctaagctttggtgtgcgcaaggggggaaacggccgtcattataaagaatctgacgcgccgacgaaaccgtttgcgtagaaataaaatcaccgctttttcttgtcatacggtgcggctatcgttgcgaataagttgccaactggcgcattgttacgcaaaatgccgctcattaatgacttatctattgcagcaaaacatctttttcagcccgaggcaacgcacgatccagagaattaactaattgaaaaaattaaagattaattatctgttcatcggcatattgacgctgctgctggcagcagccctttggccctcaatcccctggttcggtaaaaccgaaaaccatatcgccgcgattcaagcccggggggtactgcgcgtcagtacgatcgactcgccattaacctattccgttatcaacggtaaaaaatatggtctggactatgaactggcgcagcagttcgccaactatctcggcgtgaagctgaaagtgacggtgcgccagaatatcagccagttgtttgacgatctggataacggcaatgccgacctgctcgcggctgggctggtctacgacagcgcacgcgttaaaaactatcagcccggccccatgtattattcagtttcgcaacagctcgtctaccgggtcggacaatatcgcccacgttcgctggcgaccgttaacgagaatcagcttaccattgcgccagggcacgtcgtggtcaatgatttacagcgtttaaaagagacaaagtttcccgacctgagctggaaagtggatgataaaaaaggctcgacgacgctgctggaagaggtcatcagcggcaaactggattacaccattgccgattcagtggcgatcagtctgtttcagcgcgttcatcccgagctggccgtggcgctggatgtcacggatgaacagcccgtgacctggtttagccgactggacgacgataatacgctctccgccgcgctgctcgattttttcaattcgatcaatgaagacggttctctggcgcggatcgaagagaaatatctgggacatggcgatgatttcgactacgttgatacccgctctttcctgcgagcggtagataacgtcctgccggagctggaaccgttatttaaaaaatatgccaaagagatagactggcgcctgctggcggcgatttcttatcaggaatcacactgggacccgctggcgacctcgccaaccggcgtgcgcggcctgatgatgctgactaaaaataccgcccaaagtctggggctgaccgaccgtaccgatgcggagcaaagcatcagcggcggcgctcgctatcttgaagatatgatggctaaagttcccgaaaccgttccggaagacgagcgtatctggtttgctttagccgcctacaatatgggttatgcgcacatgctcgatgccagatcgttgacggtaaaaaccaaaggcaatccggatagctggaccgatgtgaagcagcgtttgcctctgttaagccaaaaaccgtattacagtaagctaacctacggttacgcgcgtggacatgaggcttatgcttatgtggaaaatatccgtaaataccagataagtttggtggggtatttgcaggaaaaagaaaagcaggaagcggaagctatgaaactggcgcaggattacccggcggtgtcgccggaggagctgaataaagcccccttccccttcctgtcgtttttatcgcagtcatcaggctacctgacgcattcgccgtctttactgtttacgccgcagaagaaagaagaaaaatagcgcgatggtcttatcggatggcgacgcgcaacgtcttatccggcattgcgctatactgccggccccgcgccttccgcacggtcggctttcttcagagctttaatttcctgacgacgcatacggaaaaaatcactgagcagcgtcgcacattcatcgcgcaacaccccttcaataatctcgacccggtgattcattcccggatggtgcagcacgtcaattagcgatccggccgcgccagtttttgcatcgcgcgcgccaaagacaacgcgtccaatgcggctatgcaccatagcgcctgcgcacatcacacagggttccagcgtgacatacagcgtggtatccagtaaccgataattctgcaataccagaccgccctgacgcagcgccattatttcagcatgcgcagtaggatcgtggcggccaatgggtcgattccagccttcgccaatgacgcgatggttatgcaccaataccgcgccaaccgggacctcgcgttcgtcccaggcgcgtttcgccagcgtcagcgcgtggcgcatccagtattcgtgatctaattcgacatcagacaaagaggtaactccggtaatgaaagcgggcggcattatacacagacgctatgcgtttcactattcgagctgctgcaactcgccgtgcggcgtcacccgccagcgatgctggcaaaaataaagcagcgggttatcctgtttgctgtcgctgtagccgctataaagacgcagcggcgtaccgattttacgttccagttgcgcgactttttcatggcccagacagcgcacggttaatacccagccgccataccgtcgcgccatctggctggcgatgaggttaacgcgcggcagccacggcgtatcaaaatagacttgctctaccaatgattgcggagaaccggtaataagccagatatccgcgtcagagctcaatagataggtggtcagacgctcctgtacaaccggaaacgccgtgacgttagcgcgaaaccaacggacaaaatccgcctgatgcgcctgcaaacgcgtttcgctatggccaaaagtacagccccacaacaacagactcatcggccagcgggccgcacgcccttttaccagtaaaccgataccgataatgggcaacaacggcagtacgagcagcgcatttagcggctgacggcgcagcaaataacgcagaaaactgccgaacatatcctgttgatgtaacgttccatccaaatcaaaaaagacgacacgacgctcgtggctgaccaaaccttactcctctggatcattgaaccccagcagccaggtaaaaataaacccggcaattaccgctattaaatagcctaacagatagaacaggacttttccggcaacaattgttaatgccagcggcaaaccggaaataccaaaggtaattaccgtcgccactttccagtagctgatcaacgccccgcctaccgcgccgccgaggcaagcgccaataaatggcttacccaatggcagcgtgacgccaaaaatcagcggctcgccaatccccagcagtccgacaggaagcgcgcctttaatcacctttttgagtcgcgcattgcgggttttcatcagtacggcaatggccgcgcctatctgaccaacgcccgccatcgccaggatgggaaacagcgcgttatagccgtgcgcttgcaccagctccacatgaataggcaccagcccctgatgcagcccggtcagtaccaacggcaggaaggttccggctaacaccgcgcccaccagaaaaccgccgcgatcgatagcccaggacgcgccgtgagcgatagcgtctgaaatccagccgccaagcggttgcagagcgacaatcgctaccgcgccggtgataacagtcgtcaataaagggttaagaattaactccagcgaccccggcagcagcttacggaactggcgctcaatccagcacattaacgccaccaccagcaggacggcgataacgccgccccgtcccggctgaagcacctcgccaaagagcgtaatctgcgccagttgcgggctggaaaggatccccgccatcacgccgcctaacgcctgcgatccgccaaagactttcgcggtattgacgccaaccagaatgttcatgatagcgaacaccgcgctaccaaatatccccatcaggcccagcaggttaggataatggacggcaacatcgccgacgatatccggacgtttaagaatgttgataatgccggtaatcaagccggatgcgataaaggcggggataagcggtataaaaacattcgccagcttacgcaacgcatcgctcatcggcgctttatacttcgctttcgcctcggatttggtacgcgccatagcgtcatccggttttacaccacctgcggcaatctgcacgcgcatcgcatcaaccacctgcgcagccttccccggcccaacgatcagctgatgttgctccccttgctttacgtatccactgacgccaggcaacgcttttaagcgcggaatatccagttggctgtcgtcctgtacctccaccctgactcgcgtcatacagttttccaggcgcagaatattttgctctccgccgataccacgtaaaatgtcgctggcgagcgctgccgtcttatccatacacacctctttagtgttctaacgccgcccttaaaaagccctgatgagcggcaagtttttccctggcggctgcagcatccagccccgtaagcgccatcaaaatggcgggcttaacctcaaaatcggtctgtttcagcaacgcttctgcttcttcacgacctatcccggtcgcttcaacgaccatccgacacgcgcgatcgaccagtttgacgttggtggctttcatatccaccatcaggttttgatagaccttgccgaatttcaccatcgcgccggtagaaatcatattgagcaccattttctgcgcggtgccggatttcagccgcgtggagccggtaagcgcttccggcccgacaacgggcgaaatagcgatattagcctcccgcgcaataggcgaatctggattacaggagacggcaacagtggtacaaccggactgtcgcgcatagcgcaggccgccaatcacatagggtgtacgacccgacgccgcgagccccacaaccagatcctgttcttgcagatttagcgcgacaagatcgtcttcgcctgcctgttggctgtcttccgcgccttcgaccgctttcagcaacgcgcccggcccaccggcaatcagcccgacgaccagaccgtgcggaacgccaaacgtcggggggcattcagaggcatccagtacgccaagccgaccactggtgcccgcgcccatatagatgatacgtccgccagacttcagcgccgccgcagcggcatccaccgcacgcgcaacgtcaggcagagtggcttttaccgcttccgctaccagcgtatcctgttcattaaaacgcttaactaattcaggagtaggcaacgcatccagatccatcgtttgcgggttacgggtttcagacactaaggtaccaagattcatttttgtccctctggaatttttaattcataataagcgtccatgatggaatagaatattcccccaggcgagtgaaatttcgttttgtcgtcgccatcacgtttcgcaggagctgcccatgaactgtttgattcgtattcgccagcgttatccggatctcgcgcaaagcgacaggaaactggcggattatctgctcgcgcaaccggatacggcgcggcatctgagctcgcagcaactggcggctgaagcgggcgtcagccaatccagcgtagtcaagttcgcgcaaaaactggggtttaaagggtttccggcgttgaaactggctctcagcgaagcgttggccagcaatcctaatccgcattccgttcccgttcataaccagattcgcggcgacgatccgatgcgcctggtcggggaaaaattaattaaagagaatgtggcggcgatgcacgccacgctggacgttaacagtgaagaaaagctgttagaaagcgtcacgatgctgcgccacgcccgccgtattgtgatcaccgggattggcgcctctgggctggtggcgcaaaattttgcctggaagctactgaagattggcattaacgcggtggttgagcgcgatatgcacgccctgctggcgacggtgcaggcgctggcgccggaggatctgctgctggcgatctcttattccggggaacggcgcgagctgaacctggcggcggacgaaacattacgcgcaggcgcgaagatcctggccattaccggtttttctcccaacgccttgcagcagcgcgccacccgctgtctgtatacgattgctgaagagcaggcgacgcgcagcgccgctatctcctcgacacatgcgcaaatgatgttgaccgacttactgtttatggcgctggtacaacaggatttagagcgggcgccggagcgtattcgccatagcgaggcgctggtaaaaaaactggtttgaaaatggctcttccgcctcatgcagaagagctatcaagtttattgcgcttctttagcgtgaatcaattgcgtcaggagtttgttaaccggtacggcaatattgttctgagcgccgattcgcgcaatcgcaccatttaaatagtcgatttcggtcagtcggcctttatgtaaatcctgatgcatagaaggatagtggtggccgctctcacgcggatcgaacactttcttcaccgtattcatcaccatttgctcagtcaacggaatattctggctggcagcaactaacacaaactcatcaactaccgcttgcgctaaatctaaagcaccaggccgctgaccaaatccgccgacattacaatccagtaacgcgcaataggtgttcattacgctattaaaggctgctttcttccagatcgataataatacgtcagggcttatttcagcattcaatccagcactattaagggtggcaatgaccttagcctcttgagccgaatcctggctggctatcggctgcagttcaatcgttccggtaccggtggccataatatgcccagccccctccagttcgctggaccataacgtcacacccgcatagattttctgccgatcgacatatttctccagggtttcgatatttcccaggccgttagataaaatcatcacgaccttcgcggctggcagcagcggcttaatacgctgtaacatgctatccaactgcatggctttggtaaacagaataaccagctcaaactccccctgggattcatcagccaacatagcagggatggggtaatacttctgagtcgtttccgtttcgacaaacaaccccttgctacgaatagcgtcgacatgctcctgccagccatcaataagcgtcacgtcgtgcccggcctccagcagcatatagccaaaacgacatcccatagcgcctgcacctgcgattgcaattttcatttttatttccttattatctgattaatgaattttggctaaaaccgttgcgacatattttttcgttatcagggtcaacacgactccaataagcaatagcaccgttgtcaaaataaatactgtattgtagcttccggtatattttgcaatagcggacgtgacgtaaggagcaataaccgcaccgacggcaaaaccaaaatacataaagccgtagtttagtccctggttacgcataccaaaattctggctggtcaagccagggaagataactaatataccggcataagcaaagcccacgcccagagcgctgaaatagaataccgaagtattaccgttgaagaacaacagcagcagcatacagacgcaggtaaaaagataaacaataaccagcgtattatagccgcctaatttatcggttaaccctccccagaacaggcgaccgatcgagttaaatatcgagaccaggctaacgactaatgcaccggacagtaaaccgtactgcgtcataccaatttgcgcagaacttgagctaattaccatcccagagaacacgcccagcgccagaatcataaacagcagccagaagcgcagatctttcagcatgtgccgatagtctttatccagtggcgaggctttaattcctccgctatcttttgctggcgcgctacgaataaagaactggacgataaaaataaccaccagataaacaatacccagatataacaacgcccgactaacatcatgagtttgcgccataaaatattcggccaggcgggtgcaaagtagcgttccgacgccaacacccgccagtacgataccgctggcaagaccgcgacggtcagggaaaaatttcagaatattattaagattacccgtaaaagccaggcccgatcccaacccggcaatgacgccgtaggttaaaaacagcatgggcaaattatccacaaacccggacaagataaaacctaaagaaaacaggataccgccgataactatcgcctgctttcctttaccattgtcgatcattctcccaccccaaatcatcggtaaaggaatgatccccatgttgatagagaatgctaacgccagcgtagccggatcccagtgatattgcgccatgagtggtgttttgaaatagctaaatgcgtagacgcccccgagcacaaaattgatgcacacgtgagcggcaagcattccccagcggttgattgatgccgacataattttccctttttaaaatgcactgatcacagtttaaaaaaagcaaaataggcaaacaatttggtattttttataatcgttataacaaaacccaatcgattggcattaaattttaatgaatatcaaacaactacattccttcctgatattgtgtgatgaattacattatggtcgggcagccagtcgcctgtttatcactcagccatcattaagtcagcaaatcaaacaacttgagtcatcacttaaaacaatattatttaagcgaaaaggtagaggaattaaattaacaaaagcaggcattattttgcaacgacacgctaacaaaataatgctggatttaaaaaatgccgaaaatgaacttcttccctatcaggatcaacagcgcgatactatttcaatcggggtgtcaggcagctacctggtcctgcccgcttttcgcaactttatggcgcaccatccggaaatatctttaaatgttaaagagttctcaactgagcaaaccattaaaaagctgacggatagcgccgttgatattggcattgtttatcgaacagcgctccctgcccagctaagctcgaccatgctgtttgaagatgaaattatcgctgcaatcccactttctcatcctctggcgacacgcgaacgtctgcatctaaaagatttaaacgaccagcccattatcgtgcttaatgactctctgctattaagagggatcatcaccacagaatttaataaccgcaaagtcgttcctaacgtcatctgcgaactggataaccactactcatgccttgagtatgccgaagcgcagattggcatcgcatttattacccgctcgctaacccatttatcgacacccaaaaatgttcgcctggtttcactgggcatccccgcattctttattcctgtcatgctggtgcacagtaatgacctttcactggataacgcaaccatctgcctgctcaagcagatcaaaaatttttacactgtagataacaaatcagcgccagaaaagagctggcccgagcagaaaataggcgtataatgcccgcccgatttgtgttgtttctgagaatttcctgatggcgctgttaatcaccaaaaaatgtatcaactgcgatatgtgcgagccggagtgcccgaatgaggcgatttcaatgggcgacagcatttatgaaattaacagcgacaaatgcaccgagtgtgtaggccattacgaaacgccgacctgtcagaaagtctgcccaatccccaatacgattttgcaggatcccgcccatgtcgaaagcgaagaacagttgtgggataagtttgttctgatgcatcacgcagataaactgtaagcgggttaacgtatttccaacgcaacaatgtctgatggcgctatgcttatcaggccgacaatatatcggcctgtaggtcagataacgtgtttacgccgccatccggcaaatctaactttccagaatgaccgtagcgcaggcgtaatggcgttcatcggccaacgtgacatgcatgtgcgccacaccgagtttttccgccagcgttaacgcctcgccccacagccgcaaacgtggttttcccagctcatcgttaaacacttcgaactgattgaacgccagaccgttgcggatgccggtgccaaaagctttcgctgccgcctctttgaccgcaaaacgcttggcgagaaaacgcaccggctgctgatgcgtctcccagatagcccactcgttgtcactgagcacacgccttgccagacgttcgccggaacgggagatcactgcttcaatgcgggcaatctctacaatatccgttcccaggccgagaatcgccattagccgcgcgcttccagcatcaaacgtttcatttcagccaccgcctctttcagccccgtcatcactgcccgaccaataatggcatgaccgatattgagctcgtgcatttccggcagtgcggcaatagctttgacgttatggtaggtcagaccatgacccgcatttacttttagccccagacgggccgccagggtcgcggcgctggcaatacgcgccagctcttttgcctgttccgcatcggtttctgcgttggcgtagcagccggtatggatttcgataaacggcgcgccgacttccgccgccgcgttgatttgcgtttcatcggcatcgataaagagcgaaacctggatgccagccgccgccaggcgcgcacaggcatcacgcattttatcgcgctgtccggccacatccagaccgccttcggtggtgacttcctggcgtttttccggcaccagacaacagaaatgcggcctggtttctacggcgatcgccagcatctcttcggtcaccgccatctccagattcatacgcgtatgcagcgtctgacgcagaatgcgcacatcgcgatcggtaatgtggcgacgatcttcgcgcaggtgtacggtaatgccgtccgcgcctgcctgttcagcaataaacgccgcctgtaccggatccggatagtcggtgccgcgcgcattacgtaacgtggcaatgtggtcaatattgacgcctaacagtaattcagccatgacaatcctcgttaatctttcttcgtttttactgtgcgtttgggcataaattgccggaacagctcccggctttttaacggttttcccccaagatacggctttaatgccatacgggtaaagcgtttagcggcacgcagggtatctacatccggaaattcccgcgcctccagcgctttcaggtgccgtccggtaaaggtgttgttatcgatgacgacgctggcgaaaaagcctttttcttcgcggtaacggtaggtcatggtgtcatccacccgttcgccgctgcctgcacagtgggtgaaattgacgccataccccagatgacccagcaacgccagttcgaaacgtcgcaacgccggttcaggcgagccggtggttcccgccagcgcctgaatacagttcagataatcaaaaaagagttcggagaagcgcgtttcatattccagtacgcgagagaggagttcgttgatatacaggccgctatagagcgtaataccgcttaacggcagcgccagagaaactgcctcggcgctgcgcagggttttcacctcgccgcgtccgctgtagcgtaacaataacggtgtaaaaggctgtaacgcgcctttcaaattggaacgtttagatcgcgcgcctttggcgacaaggcgcactcgccccgattcttccgtgaagacgtccagcatcaggctggtttcgctccaggggcgactgtgcaggacaaatgcgcgctgccacccttccacgctgtgttaactcacagatcgtctacgtaaccgagactgcgcagagcgcgttcgtcatcggcccagccggatttcactttcacccacagttccaggtgtaccggcgcttcaaacatctcctgcatgtctttacgcgcttcaataccaatggttttgattttggcgcctttgttgccaatcaccatcttcttctgcccttcgcgctcgacgaggatcagcccgttgatatcatagccgccgcgttcgttggtaacaaaacgttcaatctcaacggtaacggaatacggcagctcggcgccgagaaaacgcatcagcttttcacggatgatttcagacgccataaagcgctgagagcgatcggtgatgtaatcttccgggaagtggtgaatcgcttccggtaaatgtttacgcacgataccggcaatggtatcgacgttcatacccgtttcagcagagatcggtacgatatcaagaaagttcatctggcttgccaggaactggaggtgcggcagcaaatcgactttttcctgcacgttatccaccttgttaacggcgagaataaccggtgctttgccatcgcgcagtttgtacaggaccatttcgtcgtccggcgtccaacgggtgccttccacaacgaaaatcaccagctcaacgtcgccaatcgaactgctcgccgccttattcatcaaacggttaatggcgcgcttttcttccatatgcagacccggggtatcgacatagattgcctgatacgggccttcggtatgaataccgacaatgcggtggcgcgtggtctgcgctttacgggaagtgatcgaaatcttctgcccaagcagtttgttcagcaaggtggatttgccaacgttcggacgtccgacgatggcaataaatccgcagtaagttttgtcagtgctcattccaactccagttttttcagcgcctgttcggcggcagcctgctccgccttacgacggctggaacccgtgccaaccaccggttcgctcaggccgctgacctggcagtggatagtaaattcctgatcgtgcgcctcgccgcgtacctgcacaaccaggtaagatggcagcggcagatggcgaccctgcaaatactcctgcaagcgcgttttcggatctttttgtttatcgcccggacttatctcatccagacgggttttataccagttaaggattaactgctcgacggtctggatattactatcgagaaatactccgccgattaacgcttcaacggtgtccgccagaatggactcccgacggaatccgccgctttttaattcgcccggccctaaacgcaggcactcgcctaaatcaaattcacgggctaattccgccagcgtattaccacgtaccaacgtggcgcgcatacggctcatatctccctcatccacccgtggaaaacggtgataaagcgcgttagcgataacgaagctcaggattgaatcgcctaaaaattccaggcgttcgttatgtttactgctggcgctgcggtgagttaatgcctgctgcaacagctcctgatgattaaaagtgtagcccagcttccgttgaagccgattaattacgatggggttcatgcgataccaataaatgaatgcgtcaacaatccagcacacgaaacagacctgatacacgtcatctgtcctgccgcatcgctgcagcggaaagaaggttgtctataaccaacgctgtttcgtgtgccgtggcgaccaaacggcgccaacctaaaacttcgggggaatattctatacacaacgacaggggatgtcgttagtcttagggaatttatccaggaaataattcacgctgccgctaaaaagacggcagcgtgaacgatcatttcatcacagttagtgaataccgccgatacgactcaggcgtacgcctgtcggccactccccttcctgcttgtcaaagctcatccagatagcgaccgctttaccgaccagattcgcttccggaacaaatccccagtaacggctatccgcgctgttatcgcggttgtcgcccatcatgaaatattgtcccggcggtacaacccaggtcgccagcggttgtcctggctgttggtaatacatgcccaactgatcctgagctatcggcaccatcaggatgcggtgcgtcacatcgcccaacgtctctttacgttcggtcaggcgaatgccgttttctttcgtctcgtttagcggaacttcaaaaaaaccgctggtcgcttctccgccgttacggcgggcaaaagtctgtacaaaatcgctcggctcaacgttagagtaggtaaccggcagcgcattttcgcacgcctgaccggagctacagccaggctgaatcgtcacctctttcgcaaccggatcataagtgattttatcgcccggcaaaccgacggcgcgtttgatgtaatctaacttaggatcttccggatatttaaataccacaatatccccgcgctttggatgaccggtctcaatcagggttttctggtagatcggatctttaatgccgtaggcaaatttttccaccagaataaaatcgccgataagcagtgtcggcatcattgagcctgacgggatctgaaagggttcataaagaaatgaacgaacgatcagaacgatcgccagaaccgggaaaaccgacgccccagtctccagccagcccggcttaggcgccactttattgagcgtagcgttatccagcgcatctcccgacgccgtttgcgcggcagcctggcgcgcccgacgttttggcgcgaaaacaaacttatcaacgcaccataaaatgcccgtcaccagtgtggctatcaccagaatcagggcaaacatgttcgccatgccaactccttagggattatttattgtctttaccgacatgcagaatggcgaggaacgcttcctgaggcagctcgacgttaccgatctgcttcatgcgtttcttaccttctttctgtttctgcagcagttttttcttacgactgatatcgccgccgtagcacttcgccagcacgtttttacgtaactgttttaccgtcgaacgggcaataatatgcgtaccaatcgccgcctgaatcgcgatatcaaactgctggcgtgggatcaaatctttcatcttctccaccagctcgcgaccacggctttgcgagttatcacggtgcgtgatcagcgccagcgcatcgacacgctcgttgttgattaacacatcaacacgcaccatatcggaagcctggaagcgcttgaagttataatccagagacgcatagccgcgcgacgttgatttcagacggtcaaagaagtcgagcaccacttccgccatcgggatttcataggtcaacgcgacctggttaccgtgatacaccatgttagtttgtacgccgcgtttctcaatacacagcgtaataacgttacctaaataggcttgtggtaacagcatatgacattcggcgataggctcgcgcagttcataaatgttattcaacggcggcagcttggaggggctatcaacatagatagtctctttcgccgttgtttctacttcatacaccacggtcggcgcagtggtgatcagatccagatcgtattcgcgttccagacgctcctgaatgatctccatgtgcaacaggccgaggaagccgcagcggaaaccaaagcccagcgccgaggagctttccggttcataaaacagtgaggcatcgttcaggctcagcttgccgagcgcgtcgcggaaactttcataatcgtcggagctgaccgggaacagacctgcatagacctgcggtttcaccttcttaaagcccggcaacgctttttccgctgggttacgcgctgaggttaaggtatcgccaaccggcgcgccgaggatatctttaatggcgcagaccagccagcctacttcgccgcacttcagctcggtacgatcaacctgttttggcgtgaagatccccaggcggtcagcgttgtaggtctgcccggtgctcatcactttaattttgtcgcctttacgcatggtgccgtttttaatacgcaccagcgataccacgcccaggtagttatcgaaccaggagtcaataatcagcgcctgcagcgggccgtccggatcgccttgcggcggcgggatatcgcgcaccaggcgttccagaacatccgtcacgccgacacccgttttggcggagcagcgtaccgcgtccgtcgcatcgataccgacaatgtcttcgatttcttccgccacacgctccggatcggcggccggcaggtcaatcttgttaagcaccggcaccacttcaagatccatttccatcgcggtgtagcagttcgccaacgtttgcgcttctacgccctggccggcatccaccaccagcagcgcgccctcgcaggcggctaacgaacgggaaacttcataggaaaagtcaacgtgtcccggcgtgtcgataaagttcagttgataagtttcaccatcagacgctttaaaatccagcgtcacactctgggctttaatagtaataccgcgctcacgctcaagatccatcgaatcaagtacctgagcttccatttcacggtcagacaggccaccgcagatttggataatacggtcagacagcgtcgatttaccgtggtcaatgtgagcaatgatggagaaatttcttatgttcttcataaatatgaatttttcaactcgctatgctgataaatttttcttgatggacacagcggtggacattccacaataactaccccatcaacgactggcgtgcatattacactgtagctttgaaatcgtcagcatacgatctgctgatcaacatacgatgttacatcacaatagaggtctatacgatctataaacctataaacacggttacagtcagtcctgactaaacagcagccggcctaccgcagtcacgttcttgcagacaacgtgactgcggtaatccatcccaccggattgtcttcaaattctccatgttgctgaatcggctaacagcttcttaaacgatcggtattaggctaggttctaaatcttgcctgaatgaaaataaatgtaataatgatagcttggtattgacatatagattgaaaaagcgcatgaaaataggattccaaccagccatattgcaatatgcatatacaagtaacgaggcgacatcaaaccttgagttattaaataaatggagaatagaatccccagatattgagaaggaggagcgtaatagtatttacgacaaaataatagaagcaaatcataccgggagcttatcaattactgctcatcatgttacctctattccggtatttcctgataatttatccgaattgaatttatcttcatgctatacactggagtctattccaaatcttcctgatgggttaaaaagtttaactatatctggaaatcagaccattaaaatttcatatttcccagatagcttagagtcactatctatagatatgcaggcatatgaagaaaattatactttccccgcattaccttatggattaaagagttttactgcatgctatggtaaatttttgcctccccttcctccgcatctatcttctttgtcattgcaaaatttctctgaaatattatgtgctgagttaccatataaattagataaattagatttacaaaattgccctttcttgccattaatgaaaatgttacctgaggagttaaaagaactaagtattgaacttatacgaacagttcccggtactgttatagatgatattttgcctgataagctaaaaaaattaagtatcaacttttgtgataatattaaacttccagttaagcttcctgttaatttaaagtctatcaatttatcctcaaggacccctattgcatgggaaataccaacctgcaatctgcctgcacatatagatattagtaccgatggttatgttaagcttaatcctgaatttcttaccaggagtgatattacctttagtaacaaacctgcaggagatgtgttaagttttcagcctggagatgtggtttatggtttatgtaaggcaagagatcgagtaaatactttagttaattcgttatattatttttcaaaaaaagatattattattcaaaatacattaacagatgcggtctgggacaggaagaatagagccgtgtttaataaagatgagaagatagcagaaagattgaatgatgttcagagagggattttttttagagaatttttatctcaacataaaaaatacaatattaccgaagataaatattcagacttatccaatgaggagtgctggataaaaacaagtaaagccggtcttgaatttcaaacacgattgagggaacggtcagttatttttgtcattgacaatttagttgatgctataagtgatatcgcaaataaaacaggaaagcatggtaattctattacagcacatgagctaagatgggtatatcggaatcgacatgatgatctggtaaaacaaaatgttaaattttttcttaatggtgaggctatttcacacgaagatgttttttcattagttggttgggataaatataagcctaaaaatagaaatcgttgactttaaaaaaatatgcaattaatatatttatatatagagcagccctattggagttaaggatatatactccccctaactctagactacatgccaactttacttagtatcatattttcttgctacatatctgtttggcaagggtatgaataaaaaacaagattaatttaattgatatcgcaacagataagcacctgcatttatctttaaacttttttatggccaaccagatttttcaccatctgcgcacgtttattcgggcatgcgttgaaaacctgcaaaaaaagaaaaatatcgatgcttattattttttctttaattaaattttcgctcaacaaacttaattattaatccaatgacagtgaagtgtgaactatgctgagcataaacgacatcaatagcaagggcaagggcaagggcaagggcaagggcaagggcaagggcaagggcaagggcaagggcaagggcaagggcaagggcaatctgagtatttacaggtgaaattatgaaaaatagtatatttttaccattgcttctggtgctgtcggcaacgaccttttcggcattggtgatggctgccagtcattctccccaccagataatacaaaacatttttccagtggctggccgccagatatcctgaagcaactgaattggtctcaggtttgtggttgttagtatactgaatattacttcaggatggcatgttttattgacaccagcctgatttttcacaacgttatattacccgtttacagataattcccagctaataaatcaggaagttccagatgtaacagaagttatgaggtgtattaattgataggtctaacaggcttgaattacttttctttaaaaactactgcatgtaaaagggtctcctcttgttgtgatgagattcgtatatatttatatcttagtgatttatggatcatacttgtggttttccttaggaggtaacatgtttacaattaatagtactaacagggtggcgagcacaatcgctccatatgcatgtgtaagcgatgttaatttagaggacaaggctacatttttagatgaacatacctcaatacatgcgaatgattcttctttgcaatgctttgtcttaaatgatcagcatgttccgcagaatacattagctacagatgttgaaggctacaatagaggattacaggaacgtataagcctcgagtaccagcccctggaaagcattgtttttctactcggcacccctgcagttttagagactaaagagtctttatcattaccagtttccccggatgctttaacccaaaaactattaagcattagtagcaatgatgaatgtaaattatcaggtagcaccagttgcactaccccagccagtcataacccaccgtccggttatatcgctcaatacaggcattctgcagaggttttcccggatgaataaaacaaagcgttataaatagctgcgccgaatagtagatcactttgattgaactcagtccggattgtgtgatttgatcaatcgccaaaaatcacaaatcaccaaccggactaagcgatgccgatcatagcaccaattccccgtaccgaacgacgcctgatgcagaaaactatccataaaacgcgtgacaaaaaccatgcccgcagactgactgccatgttgatgctgcaacccgggagacagtatcggccacgttgccagaacgctctgctacgcccgttcacccattggacgctggattaactgattcaccgctgacggtgtggaggcgctggacaagtgtgatgcggataatcctcatcatatggtcatgtatttttcataaacaataaagctcgtccaggagtgcactaaataacagattgttagagcttgcttaaacatcagtcgtctaagtttaccttaaagcaagtggcgttttatgtcccatatatgccccatcacatcctcgttccatcatcaaactcactggatctcatgatgttgtagggaagtaagccggagagataatttccttctgtgccgtgccggcagaagaatttatctggcacgctgtctcgcgctgtatggagtgtgaagagccaacacccggaattgattgaacaagttacttaacacgcaatagctcagagtatcttgtggtgtaccgcagcgaaagtatttctcgcttcatagcccactgttgcggtatcccctgcccggtgattttctggttgtattgtcatgtgcgcatatttaagccagtttagagactgggaattttctgtacagcgtcgacagccccgcatcataaataatcgttacctgctgtcgcggtactcctgccctaatcaggcgcccggcctgcgctcccagtggatgggagccagtaaggatttgaatagcacatgaactcactctcatatgaattaatttacattggaaagaaaatataatagcgcttatcatttttatttaagttaaatattttataaatggtttttatttactcacctgatggtaatgaataacgtttaatatctatagtaaaggatgctgtaaccgtaaggatagtgtgccaaaatttaacaggcaacgtattattaaacacgttaagagcgtatttttagcaatgattttaatattaccatcttcactatattctgctcttacaatagcggcagactctcaagatcataaaaaagaagaaacaattaagccaatgcctcaaaagtggtgtaatctttggcctgctggcatacccttccctgaagattggtttaaaatgtgtagaggttattgagtataaatttaatatactaaccagtaaccatatcagttatgacagacaggtcttcttcatatttgctataaataaggcctgagctttcctgacaaattataaactactggctggtttctccggccagacaggctttaaagtatcaacacggtttacctgtacccggtactttctccatgccagaagagaagctttttctttatcggttgcttcgtccagatccactgcatcctgtaacggcgcgattttttcagatgccatttgcaaaagacggcttttggtcccttcagcttcacgaagtctggccgctgtttccgcagcttcatccttcacccacgccttaccatcccatttctggtattcaccgtctggtgaaactgatgtgacattttcaggtagcgggccgggagcggaaatataaacctgattgccggttgttgtgtcgtaaaccgtctcgccgcggtggtcctcatgcagactccacgttccggtttcagcatcaaatatcgcaatatgactggctggaatatccgggggcgcaatatccgtacaatttgccggtaatccagtgtgtggcgggatatatgcatcacctgcaccaataaattcgtttgtatctgaacgcagattaaaaattttaattgtctgcggggtatcgctcattttaaacgtcattttttactccggataaatattcaggtttcaggtgctttccatgagaattggggctaaggaaaacagcatggctatgcgcaccaatataaatatcatcaacctgatgacggggactgatgcaggtgttacctgattttttgcaatacgttctgtaatcaccaaaaccgatatattccgttctggcgttcggacaaagcgcctttgacggacagtatgccgttgtactgaatacagcattctggcgggcgctggcgtattgccagttaatttccgtggtgcagttaataaaaccatcccacgccagcttcatttgccgggcgacactgcccggggatacctgaccacacccggcccccatcgcagggaatactaccgatttaattttcctgtcttccccggcgcttttattgtgctgaaatatcgctaataacgctgcacgtgttgcattataaaccgcgtcggtgccgtcgattatcagcggaacgcgcatcgtcggggcgtgaaccagccacggatatttactgttacccgtttcaataacaaaggcggtgccgacgggctgttctcccagatattcacggaggatatgttgctgtacccgttcctgtaattgcggcccgaaatatgccgtaatagcagcatccacaccaccatccataagaccaaagctgttggccgcactgaccatgcagtcaaattccggtatggtttcaaacggtccggggataatttccacattttcggtattctgaaaagaatgttcaaaagccacggccattgctggcacgggtgctgaaagaattaatttaatcatgccagcctcactatgtagttaaatgcaatatttttaaccgtggtttccgcattaccgtctgcgtccacaataacgacgtgaccgtgtggaccgatatacatggtgtgctcgtgtcctccgatataaactgtatgcgcatggtcgccagcggcctgtgtccatgcaccacctccaggctgaaatgaggtgtgattggagtctccccagtatgaattgatataaccgccgaactggtgagtatggttgcccgtggtattggtcgatttcgtgccgtaatcaaaagatgaggtagattttgtccctaagtcagtatcctgcgcccgcgcggtgtgcgagtgcgatttattgccgtccatttcttgcgacaatacggcacgtccactgatgggcttaccctttattgtccagcctctcatgtcagggataacgccggacggatacgctatagccagtaacgggtaagcagatttatcgaaggactgcccctgcatcagagcgtaacctgccggagtagcatcagatggccatgcaatcgccgcccctactggatgcgaatccggaggtgggtttagtgtggtgtaaagcattgcccattcggaccactcagcatcggcggtatctcgatggctgcgaatatatgcgggcgctggcgcaccatttgtcccgctccagccaatgaggatttccccatcaccggttccggtcagacgtaaaatatttccgtattgcgtcggatagccattgttgtagacctcgcccattatcaggccgccatcgctgcctcttgtcgtgccagtcagtgccggaagcgcgccgcgtgatgcaagcctgttcgctgcgacagccgtaccaccagcaggcaacgcaccagcagccttatcaattgtgctccgtaaaccaacgtattcgataagaccttcaatgctttttcctgacagcgccgtcagtgtatcgtccagcggctgcttgcccgcaatcatgttagtgatagtggtagcaaaattaggatcgttacccagcgcgtcagccagttcctgcagcgtatccagcgactcaggtacggaaccgaccagtgcagcaatcagtttacgaacaaactcagcgtttgcagtctgaagtcccttagcgtcatctggcggcgtcggtgtggtcggcgttccagtgaataccggactgtccagcggcgctttggtctgtacctcgtccatgacagcatggaccgcctttggcgtggctgccagcgcttcgctgtcactgtccgtggcgctgcttaacttaacgataccttttttcgtcaggctggcatcttccagggaaatcacgtccgcgatgtcttctgcccgttttgcggcatcttctgctctggtggctgctgctccggcagcagtactgctttgcgccgccagtgatgcgctggtatcagatgcggcggcgtgattggatgcctccgatgctgatgacgaggcggctgttgcgctggccgctgctgtacttgctgacgttgcagcgtttgtctcagatatttttgctgcggctgccgatgcggctgccgccttttccgacgctgccgccgcagtggctgacgcacctgcatcaccggcactggaagccgcctgcgtttctgacgtcttcgcggcggtttcggatgctccggcgcgcgctgctgatgtctgcgccgccgtcgcgctggcggctgcggcagcagctgaatcgccggcggcagtacgggagacatctgcattcgcttcagatgttttcgctgcggctgccgatgcggctgccgccgttctggctgtgtcagccgacgccgcgctggctgatgcctccccggcttttgtggtcgccgtacctgcgctgctctccgcagatgctgcggatgaggctgcctgtgtggctgatgcttctgccgctccggctgcattcactgctgccgtggcgctttccgctgcctgacctgctgatgtctgcgcctgttcagatgcctgccctgcggcggtggcattccgcgatgcctccgatgcctggcgggcaacttcttccaccatcgcctcaaaacgtcgcagcgcctccgggcggacgtcgtcttccgtcatggcccccagaaaatcattcagggtgcccggttttgaatcatcgtagaccgtaataactccggcatgtgacgggggatacccttccaccaggagcgtgactgtgtactgcccctgctccacatccatgctgtagcgcccggcgtcatccggattttccgatgccaccgtattcacgaccaccgtcgtactggtccggcaggccttcagctgaatggtgcagttctgtaccggcgttcccgtaccatctttcagtacgccggaaataagtactggcatattgcctccataaaaaagcccgcccgcaggcaggcttcagattcattcacatctcagcactgattatccgggtcacgtaaatatgccggcagcgaacactggacgctccgcgtgattatttgtccctttgcctcgcggtgctgtttctgcccgcggtcagtaccggtataaatccgggtctggttttcaatattgctgttaccgcttcctcttccgttatcggcaacggcagcggtggaaaataaaacggacagggaaacccctgccgccagcgaaattacgcgcgacatagtcatatctgttccttgttaaacgaaagagaccggaaatccggtcagtttgtgaagttgttccccgaccgggaaaccatcaccagcggccagacggaagcagacgtggtgtactgcccacgaaccctcagagaaacgctgatatccacgacaggtgaagtggtgtagaccgaaaagacaacggtctgatacatggccggaagccctgcggtatacgggataacctccgccgttttcacctggccgttaatatttatcgtgacggtgatggcaccggagccaccgttacgctcacagttagccatcaccgtgatggttttccctatctgataggtggcgctgtcggtataccgtgttgaggtgctgcgttcgtcgttcgtctccctgatgctcacgccctgcatgacttttgagccgcagatatcaccgacaaactctcttgcttctatcacgccagaaaacttaccggaggtggcattgatttctcccgtaaacgagccagatacagcgttgatatgcccgctgatatccgcatttttcgcagtcagctttccatccggcgtcagggaaaatgccggaggattcccgccactggtaatggtcggcgcgctcagatatttcaggaacgcctcattcatgattatctggtcgccctgcatgacgaatccgggcgtctcgtttccgtttgccgggttaatataagcaatgcgatccgccgccaccaggaactggcttatcttcccgtcaggcatgtcttccatgctcagtccaagtccggccacataatatttgccgtctttggtctgctctattttgacgccccacatggcgttccatttatcgttagcatcctgccactccttcgaaaactgctgcagtttgctggcgttatcctccgtcagttccaccttctccagcagttccttacccaggtgactttcagttatctgccctttgaaaaaatccagatagcctgcggcatcgttgctggcctgcccggtcgcctccacgaatgcggatttaccgacctgatttaccgcccggatataaaaatagtaatccctgccgggcctgatattcacactggccgctatccagtacagcgccgttcccagatatcgtgcggcgttttccacctgatggatatccgtaatctgcgcgtctgaaaaccagaactcatactgcaccgtcgggtcgtataccgcctgacgcggtgtggctgtaatctggaaatagccaggggtgagttcgataaatgatggtgccgccggcgcggagatgctgaactgtgtgctggccgggtctccctgttgtccctggctgttcaccgccctgacggacagggtgtagcgccccggcgtcagcccccggaaccggtactgcgtatccggcgttcctgcgctgcttaccagccggtcactgccatcttccgccgccacgttcaggcgcaaagaaaacgaggcgcccttaacgactcgcggtgtgtcccagcgcgccagtacctgatactgtccctcctccgccagaatttctgtggtcagatgctgtatcgccgggggaacggtgccgtgaatcgttccgggttgcggatcgaatgatgccccgttgtccacgatggactctttttccggcacatgctgtacggcggtgatggcatacgttccgtcgtcgttttcccggacagccacacaccggaagagacgctggcgcagcgacggcagtttcagcccccagacgctgtattccgccacgccgtccggtatccggctgacctgaacctgcacaccgtcggtaacagactgcacgtccacgctgaccggcaagccttcgccatccatcaggcttatcagcgtggtgccggacgacggcagggtaatctccctgtcaagggtcagaatgcggcgggcgcggtcaacggacagaatccgcccgcccaggctgatgccggcataatcctcgtcgcaaacctcaatcacatcaccgggaacgtggcgcagcccctccgcacccacactaaaatcaaccgtctgggtttccagcagctccgtttttatcagccacagcccggcgcggtgcgcctgcccgcgactggtacagccaaacgcatccatttttaccagattgcgtccgtagtgactgatggcgaccgtgtcttccaccagttccgtggatgtctgccagccattatcagggtcgatccagttcacctctaccgcattatggcggtccttccgcgcactgaagctgtaacggaacggtgtgccctcatccggcattaccacattgctgcgggtataggtccagactgtatccgagggcctgtcctgcacgaaggtcatcatctgcccgttccacaccggcatacaacgcatggcggagcagaagtcggtcagcacatcccacgccttacgctgctgtgccagatacgcattaaaggtcatacgcggctctgtcccgccgaatccgtcagggaccatctggtcgcagtactggcctattgcatacagcgcccacctgtccacgtccgccgcgccgattcgctgtcccatgccataacggggatgtgtcagcacatcccagagacaccacgccggattattgctgtatgcaggcttgaacgtgccgtcccagatgccgctgtaggttcgcgctaccggatcgtaattcgacggcacatgaataatccgcccgaaaaaatggtaatttcgcgtcacctgctggctgccgaactgctcagactccacctgcaggccaattacggcggtgttgggatagcgctgccggacatcaataatctcggtatacgacgaccagaccgtgttgttctgtaactggtcagtggtactgtctgccgtcacacgtaccatccggataccaaatggccggggagggagattatccactatcaccgaggccagatactgtgtggttgttttcccggtaatcgtaatctctttttccaccacccactgaccatagcgctcaagatggatttgcagcctgaccgatgtcggattgcggtcgcccttgctgttggcctccaccagtgactgcacgccgaacgtaaaacgcaggcggtcaatatttgcagccgtgatggttctggtcaccggattgtcgtatttgacctgtacaccaagcaccgtctcggcgccggacgattcaaatccctccagcggggtctgttcctgctcaccgacgcggtataccaccttcacgccgtggatattcgtgttaccgtcgcggtccaccaccggcgtctggtttaccagaacactttgcagaccgttcaccgggccttctatcggtccctcgctgatggcatcgatgacgctcagcagctgcgtggatttaaggttatccggtgcctcgcggggcgtatgcccttttccgccgccctttcccatttattaccccgtaaaacgacaaaaccgcccggaggcggttctgtctgaatctgttctgttgtcagcggccaatcaccacaacctgaccaccatctccttcatcagcggtactgacttcctgggaaatcacgcgtgaccccacctgcatctcgccgtacagcaccggcaacgtgttaccgttggcaaccatattatccagcgacgagaaatacgtgttctgcctgccgttatcggtctgcctcatttcggacattttaggttttggtgccagcatctgcgccacaccgcccagaaccatcgacgccccggtcatatacataccggataccgccgccgctcccagccagcctgccgggttccaccaggcaacggcaatcagcgccgcaccaagcaccgcctgaaacaccccgccagatttggccccgcccagacgcggcacaatatgaatcaccgcgccaggcggcagcgggtcatgcaggctggttgtcagggtatcagccgtaacatcgtctccggctatgcgtacctgataccagccgtcgttcagtttctgccggagaccgggcaactgtaccgccagtgcccggacagcttcagcaccactggctacctgcaggctgacgcggcggcaaaatcgttgcagatccccgtaaaggcagatgcgcgccatgcccggtgtcgccagatggagtgcgtgcgtcgttgccatttgtcggtatacctctcacgtttactcagttgttcaggaatatggtgcagcagctctccgtcgccgcagtaaatcgctgcgtggttcggaacggaggagccaaagcagcaaatcaacacgtcgccgggctgcgcactggctgcgctgacacggtaaaaccccgtcgtctccagattatccagatagagattgtcaccatgccgccaccagtcgtcgtcccggtgaaaatccggcatatcaatccccgccagatgataggcatcacggaacagcgtgtaacagtcaaaaaccccatgtttataatgccgtccggtcaggtgtggcacacagcggaatttatgtacctggccggcgcataccagccaccacggcaggtcgctttgaacctgcagcctgcggtccacatcgctcagatacggctggccgccaggatggctgtgaaccagcgccacaatatccccctgcgtttcagccctcagccagtcctccggcgccatacggaaataatcctccggcgcggcagaaatattcacacaggggagataccgttctcccgcctgtgttctcaccacgaagccgcacgactccgcaggcgcacaccgtcgggcgtgcgccagaatatcctgttctttcatgatgatttactgtgaaagtttattaatggagaggaaaccgccaaagtttccggtattgttacgcagggcgcatccccgggcgcagcggctgcaggcatcttttgccggatcggcggtagggttatcaaattcatctgcgacagctggtcccgtataaccgcattcgtcagagcggtatatccatgtacaggtattggccagcataattcgcccggggaagacacatccgtccgtttcagtcggtgttgccaggacaaatgtcgcacttaccgccgtcagatcactgcactgctcgatcacccatcggcttacggattcctgctccgggtcagcctcctggttgccgttttgaaaattcacggcatcgagaaaccgggcatatactatcctgcggatgaccgtcgccccaaccaggctatgcaaatcctccaccattccggtcaccataccgtaaagattggataccttcagtgacgggcgcgcagctgcgcctttgccgttcatttcaaatccgcaaccgtctacaggataaacgtcatatttccgtccctgccaggtaaccgcctcccccttttcatttgcctcgttacaaaaaaaataacgatcaccgccagactgtgtcagatcgatttcccacaaagtgatcctggcggactgcgccagtttagcggattcgttcagcgtatcctgcgaaatgtcctgcatcactcctcctcagataacaacctgttcaaaagtcgtggtcacagtcacccaaagagagccaacgttaatcgaccatttgcggcaaatcacccgaatttgtgtccaggtataaggcggcgtccagagaaaggatttcactccaccgtggcgggataaaaatgcctcaaggttctgatgttctcccttacgaatccggaccgttacgttatacttcgccagatggttgttcagcccggctggacgccgttgttcatacccgtcacccagttttatggaggtgacttttggttctgattccactgtcatatcagggcggatcttccagttaaatgtttccattgttatcgccctcctccagcaatacccccgtcacgcgactgctgttgccagaaatcaatggcggctttttttccaatgttatatacggcctgtaatgcctgcggaccaatctgtccgttgccggcgtcgttgtggatttcaatgttgtactcaggcgcaaacatcgccatccctcctgaaccggctgccacgacacccagcttaccgtcagcaccacgacgaagtggtaatattgcctccggtcctgcctcgcccatcaccccggcacctttggcaaaagcaaaaaatgtcgggcgattaacaatgctgccgctgtactggctgagtcctgccgaacggtacacgccgccgtccgcattcggaataaccgacagcgccgcagaactgtatgcccctgatggtgtactgccgcctgccgatgtgccaaagccgaacattgccagcactgaacccaacagtttagaagccgcaatacgtgcctccatttttgcaaggtcagccaggatggagaccgtcaggctccggaaactgccctttccggtcacggcaaaattcgcgatactgtccgccatgccgttaaatgcgtttgtgaaaacgttctccgtcatgcctgccacattgccgccctgcgccagaaagttatccagcgcccgcgacgcccccagcgtccagtctccctgcgcagcgtcaactttcgcattgtaatccgcccactcagccagccggcgatcgagactgcccttcagcgcctgctccgcctgacgatattcgtcagaaccgtatgtcccttttgccttgctgtcgcgtttaagctgctccagttgttcctggtagtgctgctgaattttcagacgctcttcgtatcggccacgttgctgatcgcccatacccattgtggccagcgccattgcgtgctgttgcctgacgcgggattcttcgtcagcgagctggctggtcaatgtgagcgtctttttcttcagttcattaagggcattctggtgttgcaaatcctgttgtgagatatccagcttctgtagcgcaagcgcaatttcatccttatgtgccagtacgctttgttcatccgccgtcagttttttaccggacaaatcagcgatgcgctgctgaaatgacaaaagctgcttatgcgcttccgtcattttttcggtcgtggaaagcttcgcggcggtaatctgcccttcagtctgcgcctgttgctggctgtactgcaaaagcagtcgcctggcctcgtcgttgtggtaagtctttggctttttcgcctgttgtgacaacgcctttttatgacgttcattttcgcgctccagtgcggcattgcgtacagcagcatcggcatactgcatggcggtaatgcgcgccacctcccgttggtgccgcagggattcagtttcattatcccggttcagcgcggcgttctgctcgttccgacgtttctgcgtttcctgataattacgctctgcctgcgccttcgcatccagcaggtccttctggcgtttctgttcctgaagttcgttcagctgctgctgatcgtattcagtctgggaagaagacaccgtccagggcgtttttctgtcgcgcgcgattttttcctgcagtgtcgcgatcttttcatcgagcgtgtcttcccgcccgatatccagcatccgatcccatgcccacttcgccgcatcaccgacagcattccatgctctttcaatccagcccagattgtcgtgtacgtcccccatccgcttattcatttcttccgaatacgcggacatggcaattttcgcggcatcagccactcttccctgctcgcccagtaccctgatttgttcaagctgggtggctgtcagaaaatgcagtgtcctgtccagttctttcgccgcattcaccggatcatcccgcaggcgtttaaactggcggatggtttcatccactgattgtcccacgttttcctgcattctggtcgcggtacgggataccattgccattgcctgcccggtaaacgctccgctaccgaccacctgtgccagcacgcctgcagcatcgtgctgcgtgacgccatttccggcgagcgacttcgccatcgcattaagctggcctgtggtttttccggcataactcccggtcagaataagctgtttattgaacgtctcgctttccttagcgccttcatagtaggccttgcccagcccgtaaacagcagcagccacgccgccagccagcccgccgagcatcatgcccttcggagacatcagttgctcgatccacccggcgcggttagcgagcgtgataccacttccccgcagtgccccgaaattcccacgggccagctcaccagccagcacgcccagttcacgacgggcagcagcgcttttcagtcctagcgtatgggtggcagttccggtacgctccagtttacggatataaatatctgcggcgctactgacacccagttcagccgccttcacccgcagcagctcggtacgggagaggccctgtaccgtcgtctgctctttcaggcggcgtataaactgtgcttttttctgcgtggccagcgcttcggcatcggtaagctcacgggtcttcctggcggtttcagacaccagcgccagataatcgccctgtgagatatctccgcgtcctttcgcctgtcgtacctgcgcctggatacgctgcagctcctgcagaccaccgcttaactgttttacactgtcaatctggcggtaaaaagcagcacttgtcctgtcctgtgctgccgccacagccgctgactgcgcctgttcctcacgcagtttccttcccagtgcctccacccgctgtcgcgtctgatccacatccgccgccagacgcgtactggccgctgcgcttttctccacagcggaactgtacgcggtactgctggcagtcacttgctccagactggcggacgtccggcgcgtcgcctccgtctgcttatccagaaaacgctgcatccgggccgctgaacgttctgagtcaccagccgcatcgttcagcaattttttaatgcgcggaacttcgtttcggaactctgcgctgtcgatacttaaatcaatgaccaggttcgctatctggtccatagcggacacctccggtaataccttcgcccaggatcatcagttcatcatccgttttttcgtgcaacgactcaggatcagtgatcaggctgaacatttctgcatcgtgatgcgtgcctgtaaccagtccggaaatcagcgatttcagcgttgcaaactccgcatccagcaacatgtcactgaagctgttcttcccgaaatgctccgcccactcacccagctctgtcgcactcatttccgccagcatctgccgccagtctggtcgccggaactcacgcgcgagccgcatcacaaacgccagctcccggttcaggacttttccggcgtggtcgtgtccttttcactcccgctgtcgtcttcctgcgatgccggaagacgcataccactcagggacagaaccatatcagcgccacgtcccagcgcctcataagaccattccagtctgacggactcatacagggcgcgggcctcctcctcttttttgctttcacacagggagcgggataccagccatgcattaatatccacccccatctgcataaattctgtctgacgctctgcttccgtcagggtttcaggctgtgcgtcatagtctgccgtccgctgctgaataaacttcagataatccacacgttgcagggcagaaagctcactgagcacgatggaatgcccaccgtagttaaaggtgtctgtattgagaaacatgatgattttccatagaagccccggaaccggggcggactgataagagagggttatgacgccgtcactgtcactgctgccaccgcgacaagactgccgtcactgctgataccaacaatattcacgctgcccgccttcacgcctttaaccgtggccacattatccttcagcgtgacggtggcgatcagcggatcggcggtcgcaacctgcagcgttttatctgacgcgttatcaggttttaccgtaaatgtcagcgtggtggtggctccggcagccaccgtggcactggccggcgcaacggtcacgccggatacgctgactacgtcaggtgtatcctcctccgcaagagaaggacgcccgacgccggtgatttttacgctgcgtgtcatcacctctttggacgtcacggttttacccagtgaactcagccagccgcggaacacatcaaccgtcccgttaggatacctgatacggaaggcgcgaacttcgccggtgtcaaacagctcaaccagttttttctgtccggtctcaccgggtttccaggccagcgtggccgtggtgtcaccgacgcttttctgcccctgcgtagtgcttttccagtcggcattttcatcatcaagatagtcatcgtcttccgcatctgcactcatttctccgggctgcagatccttaatacctgccagtcgcagccagtcatcatcagccagtggatttttaaacgcatcgccgctgccggtatacagccagaatgtggttccggcgcctttcgtttttaccagtgggtttggtgttcccatcatatcctcctcagttggtataggtgatccggtaagtaatttctgccatcccccacgttgccatttcgctgtcacgctggtagtcataacccagcggggtcatggtatcgataaggcgctccagaccactaacctcttccagcgcaggaaagattttttcttccatccagatatcaagctctgtatcaggagcctgagccctcagaaaaactgccgtatggagagtagcctgccagtcatcctcatcggtcataaggcctgtatactgtgcgtctgtcagccagacagctattgcgggtaaatcttcctgttctacgaaagcaggaagtccatcaaaaagagtgacaggtgcgccagtcacggattccagcttttccagaacggcccggcggattaatgtgtgtttgctcatcagaatgcctcctttcctccccggcctgaaggccggggaggaaaggaggcggttttccggctaactgtcttttgcataatcacattttcctctttaatatgtgaagccatgaaacgcgcatataaataccggttttaccccacgactgagcaggctgagcttttagctcagacgttcggttgtgtgcgtttcgtctacaactccatcctccgctggcgtaccgatgcgtactacgagcgaaaggaaaagatcggttacctacaggccaacgctcgccttacggcgctgaaaaaggagccagaatttgcctggcttaacgacgtttcctgcgttcccctccagcagtctttgcgccaccaacaaaccgcctttgctaacttcttcgccggacgggctgcatatccggctttcaaaagcaaacggcacaagcaggcggctgagttcactgcgagcgcgtttaaataccgcgacggcaagctgtacatggcaaagaacaaaatccccttagacgtgcgctggagtcgtccgctgccgtccgtgccgtctaccgtcaccatttccaaagatgccgcagggcggtactttgtttcgtgcctttgcgaatttgaacccgcatcactgccgatcacctcttcaatggtcggcattgatgttggtttaaaagatttgttcgtcaccgataccggattcaggtccggcaatccccgccataccgctaaatacgcggctcgcctggcactactccagcgccggttaagcaaaaaggccaaaggctcaaagaaccgcgccaaagcccacttaaaggtagcccgactccacgcgaaaattgctgattgccgactggatgccctgcacaaggccacccgcaaactgattaacgataaccaagttgtatgcgtcgaatccctgaaagtgaggaacatgatccgcaacccgtcgctatccaaagcaatagcagacgcgagctggggcgaacttgtgcgccagctccggtacaaaggcgaatgggcggggcggtcagtggtagccattgaccagtttttcccgtcctcaaaacgctgtagctgttgcggtttcatcatgaaaaaaatgcctcttgatgttcgtaaatggcagtgccctgagtgcggaactgaccacgaccgggacgttaacgcggcacgtaatatcaaagctgccgggctggcagtgttagcccacggagagcctgtaaatcctgaatcgctcaaagcggcttagattcggctcgttgaagtgggaatccccgtccttcagggcggggagcagtcaacgtgaaagataaagcctcagttgttgtttcagggcataccccagttgcttcggtatttcctcgtcaatcaagctttgtgtggcgctttcgaatgcctgagtcaatggtccggaaagaggaattttcactacatcgattggataacggtttttcccgttaacgcgtcgcataacatgccagcgtccgttagccagttgctgaataaaggcatcccggaacagatatggcccgattttaagcacacttccgcgatacagcagtttgcccctccgtttgctcatcctgacctgtgcagcgcccaactttatggcgggaaggtttccccggttaatccgtatccgggcagagcgtttaccgtctgtaccggctttaaataacctcaccctctggcgaaccagcttcagcggaagtcctcttacctggttatctccggcgacagtctcccgcgccaccttacgggttgccactgaaacagctttctgcgccacgcgattcacagcccagatactggcccggggaaccatctgtcggtcaaggctgttcagattccggatcgcattttcaagccctttcatcagaatgcctccgggaaaccccggcctttaggccggggagcagtcaaacattcctcccgtcctgcgccggttatccgtcggcggcgtccccctgcccagcagaataatactgctgtctccaccagccggagtgatgcgatccacccagaaggtgtcaccgagaatggttagtgtgtccgggcgcttcagatggactgtcagggatgttttgacaaaaaatgtaggcttgtctccctcaatccggacacctccggcggcatacgacacactttcaggatcgtcaaatacgcccgtaagcgtggcccctgccagaacgccggaggttattgttgctaccgttcccatcacccggaggatggcatcatcagcctgagaaatcgcggtatcaaacaggttttcggactgcgacatatcgccacccttacagttcaataataagtcctgcagcaatcagctcgtccacatcgtgttgcgaaatacgcgccgggtttcccgccataaccatatccagttcccggttactgtccggatcgatggcgcagatgtgtagtgtacgaagcgccctgataagtacccgttcggatctttgcccgatcccgggcggcactatggattcatcactgtcattttccacagcaggcaaatgctccgcctccgcttcctcttcccattccatgacacgctggctgagttcagcggcgctcccggacacatccggatcacgaccaagccgcgtcgcaagctcccgcagacgctgtatattctcttcttttgttgccataaaagatcctcccgcaatttgtaacaataaaggcctgaatcaggccttttgggatgcttaaccgacagtgacaatgacaaactcatccgggtccggcaggaccatcagcggcgcagactgcgtcatggtatattcattcgccggatcccccaccgtcagccagtgtttgggataacgggtggcggcaacaataccctccgcgagcgcctgtgaatcctgaatggcaccatagcagcggataccttctgccgccgtatttcccagaaccagagtcccttcaggcaggtaacgcttttcggtcccgttatcagcaacataggatgttttagccaccacaatggccaaatctccgtaataccccttgaacgacaccacagccccaaggtccttcaccgccgtttccagctgagaatttgaaccgcggcgtgtatccagtttttcacggaacagcttaaaaccgttcagcagacgccagactttcccgtccatcacggcaatattgatcagaccggatgcctggtcgcagtacatatccagatcataagtcgggtcaaaggtttccctgtcctgctctgaccattttttacctgtggcctgaataatgttattcccggcggagcgaccaaaatccacctccacggtgtcaaactgctcgccctgcatggtgtatttcccgttcagcaccgcactgacggcctgcatctcctccacctggacgatggccttctcttcctgcttcaggttatcggtcagaatgcgcagacgacggtaggccggatcgttaagcctggccgggtcttcacccggcagacgctcaacaacctgcgcatagttaacttcatgcttcggtttgacataccccggacgcagtacgcgcgtttccccgccgcggttacgcagaaccttccctccaaccaccggagatacataagcggcaatcggtgtttttccggtaattttgtccagcatgacttcctgggtaggaaatgtcacagtacggcgaaaaaacaggctcaggaagagtgggttaaatttaactttctgctcggtataacccagcaactggcgggtggtaaacaatcccataaatggtgtcctccggacgttaaatacgataaaggccgcttcgcggccttcttattacggtaaagcggcgtgactgacggcgcttccggcgaatgcatttgcctgcttaatggcatccacactcttcggccatgccagtgattctgtggcaaaggtgccgctcttccagtacgtcagcaggttttccgacccgtccagctcaagggccagaaccccgaccgccgttccggccttctgcccgtcccaggccaccagtttcccggtggtatcatccagcatcaggggcgtcagcatcggtgtggccgccgttatcccgctgactcccgttgcggtatgtgccggatcgttaccggcgaaaatgcggttatccgcacgtttctcaatagtggtggtaaatgacatactgtctccttatcaggtggctgaagtaccgggaatactcatcaacaacgtcgtttcggtatcattactgtggcctttgccgccggatatggggcccggggaatgagactgcatgaaagcatcaaatgcgttgttcatgctcagccccgcattaccggatttgtccggcgcggcagccagcaggtcacgggcctgatctgtggtcataccaggcatgacagccagtttttccgccaactcttcacggcctttcgcctcatcaagcgccatcacggcatcatgaagtgacgttgccgcagcgatcggcgatgctgccagaatggttctggcctgttccaccgtcatctctggcatggccgccagtgtctgtgcgagtgtttcccgaccaccagcttcttccagggcaaggatacggtcagcggtgctggtcgtgtccgccggcgcggcggcagccagaatagacttcgcctgagcaacgctcattcccggctgcccggccagcatctgtgccagtgcctcatgccccctggcctccgggcaacccagaattcccattacgcgctggttttcctgcgtgacagcgtcagctgcacttaattcaggcatagtgcctcctgtcttgttactgttgatagcttctgccatcacgccgatggcgtcagcagcattcaccattccatctgccagtccggtagtgataatggcctgcccgtcatacactgccgcctccgtcgccattaccgcatcgacagacaaccccgtgtaccgggccactttttctgcaaacatctttctggcctcgtccattcgctgctggtagtcggcatagacactttccggtaatttctggctgggcgtcagatcagccttgtgtgcgccagaatagataagggtgatatcgatcccttcctgtttcagtttttcggcgtagctggtatgcgccatcaccacaccaattgatcccattctggacgtctgggtcacaaggcggtgcgaacaggctgccgccagcaacatggccgccgaacaggctgtttcatttgccagtgcccagacaggtttctgttcgcgcatccggtaaatcatgtcagcacagtcaaacgccccggcagcctgaccgccgggactgtcaatatccagcagaatgccttttacctccggatctgaaaccgcctgttgtagccgggcagtgacaccgtcatatccggtcatccctgaaaagggacgcattccgccgagtttatgaaccagtgttccggtcacgggtaataccgcaataccgttcactacctgataaaaacgtgcctgcggctttccggtcgccataaaatcgcctgtgaccagtgccatatccgactgatccagactttcgttattaccgggaatgtgcaggctgttaatgcctgactccctgcccagcgcgcaaaagaaaacccgcgcataggcgggttcaagcagcaacggagcactggttgcctggctgatgatgtgcgagagattacgttgcacgcttttcctcctccgtctgacggctcgccgcgatctgttgttgataggtatcagtgatccataccggacgcgaaagtccggctgcccgccgttcttcggattccctgacctgctggcggaatatctcctggtaatcctcgcccataatggcgagttctttttcataggtactcagcccggcctcaatacgcatcacggattcctgaacctccttgagtccgtcaatcgccatacgtccggcaccaatccactccgagcggctccagctggatcgggcctcccagaaggaaaacctggcccggggtgcccggataactccccgtatcagcgcctcctccagccagcaggaaaacatttgtgtcgccagccgtccggcaatgaaccggcgccgccccaggaaatagcgccaggactcattggcagatgcgcgggcgctggaatagctgacctgagaataatcacgcgaaagctgctcataagagacccccagcccggcggcaatataccggagcagcgcctgctccagcgctgaaaagccattatcggaatcctgcgcagtctgcagattcagctcatcacccgggtacaggtggggaatttttacaccgcccagtttgatactgttggtactgtaatagcgggcataatttgccagcatgttaacaaggggcgtatctttgttatctgccgccgtgatgtattcaaaggctttctcggaatcgagttcgctttcgatcgtggcggcgtacatggctttgacaatcgcggactgaagctgcgttgcctgcagggtatcaagcatcttcagccgctccatcacactgtaaaactgattggcaccgcgcgtctgtccgtcctcaaccggctcgaaaatatgtaacatcgcgggtcgtccggacggcagaaaacgaggaatacgggtccagcgttccccaccagccaccggccagtcatcatcacagacatgataggcgagggcttttccattccggtccgtttccactcctgcgcgaagctggcggtttccgcgggcataccccggcgtgtccacccgtttcggactgacagccttgaatcgggtacggaaaacctgcgtggtttcagcgtcccagacaggctggagaaaaatttcaccattaaaggcgtgaacgcccacgccttcacggatgaactctgtaaaagtacgcttcccctcggcatccatttcgccaaaaataccatcgcaatattctgtccatgcagcttcaacctcatccacaaaactcttcgctgcgctctcacgcataccaagatagcgccagtttggacgatagctgataagaaacaggtgtccgacaatatgatccttgtgcagcgccaccgcatttgctgcaataccattattacggaccagatcatcagcccgcgcattgccgaggcgcaacgaaggcagcagcgcggcatccacgctttccgccgggggcatccagtcagccatctgtccgccgaaaccgatccccccgccggtgtatcccagactttcccgcagcggcgtgccgtgaacatccaccagaaccggggtgcgcttcacagtctcacccccacaggtgcccggcggcgaccattgcacagtgacgcctcaagttccgcgacatattttttcagatcccctaccgatgtcgcggtaaattcaacccgtcgcccgtctttctgaaccgtcgccacccgttttcccgtcatcaggtcatgcagcgcgacgcgggcttcctgtagctcagtgattgttgccattaactcctcctgccagcattgcggccagttgttcaagtgtcggggtatcctgctcttcgcttttccttgatgtcgccagcgcctccagatccagttgccagcgctgcacagacacccgtaacgctgcactggcatagacaagacaatccagcgcttcgttacgacgtcctttggcatcccataacagccggaattttccgttaaccagtttctccaccagctcttcggctaccagttgcttcgcttccacctccgtaaaaacatccggattatccggaaagcggatcgcataaggcgtggcttcgtcggcaggcgcagtaaccgcccccattctggcgtaaagcatttctttggcagtatcagtaccgatttcgcacaggaataccccgctctggttgcgttttttaggcatggtaataacgggttttccgtaaacggaggcccctttgacaggcagcacgcggaaaatgccgtgtttttttgagcgtttatagacgatttctgcatcgataccgccgatatcccagcagatacgggaaatggaaatatccgtcccgtcagcatgacgatattttttattaatgacggcatccacacgctgcagggtatcttcatcatcatgccgtcccatgataatttgcttatcaataaggaaagcctcttcgcccggcgcccagccccagacatacatttcataacggttacgctgggagtcgataccagcggtcagatacaccacccgctccggaaccggcgccgcataatgaatcactttttccagcaaaagctcatggctgagtttttcggccaccgcctcttcataaggctcgcccaacgtggtgtttataaaggttttcacaccatttggatctttcagcgcatccagccagtcataaataatctgtatccaggtggtaaagggactgtaagccgtccagatatgaaaggtaatggatcgtggcggcggaacctcctcaccggacgcgctgaaataagccagtccatcgcgtgtccacatgcctgtgttatcgcaaatccagcggcctgctttctgatcaagttccgattgacggatcacgcatccattatgttcacaaaggtaatacaccgtctccggcttgcttttctcccatttcagaccgaacggcgtactgccatcaccgaatttaaggtactgttcttcgccacaatgcggacacggtacataaaaacgcataaaatgcgccgattcatttgccgccttttcaatctggcatgaccctttgacttttggtgtggagccccgaatggatttaggccagacagaaccttcaatacgtttatcccccagcagcgtcggcgaaccttctttctcgacatccggctcaaaagatgacaattcgtcatagcagaccacatccaccgatttttcacggtagtttttggctgctgcaccgccgaggcaccagaacccgacaccggaagaaaagcgtttcagggtaagcgtgttatcacgatgtttacgcccgaaccagggggccagctccagcaatacaggaacatccctgatagtcggctccacgtgggatttcataaaatcctcagcggatgagtcggtcggctggaacagcaggctgttgcgcgacttgtgctctatgaaatagccttccacccccagcaacattttggtatagcccacgcgggcagacttaatgaggtttacaacgcggatcagttcataccccatcgcgttcattatcgctacctgaaacggcagcgtttcccatttgccgggggtgtaggaggactcttttggcagatagtaatactcatcagcccactgcacggtggtaagcggtacgggaatatgaagcgctatcagcccgttagttatggctctgttggcattattcgccctgcgctctccggaaatcatcggtccacttctccacatccgctatcgtggcggccctgcctgacgccctggcgatttccgttctgaccacatcgatgtgcgactggcacagatcaggatatttgcgctgtaataccagcggtacccttgacagtatccctgctatttcctgagccacccgttgcaggatgtaggtgaacagttcggtctcaagaaccagcccttcgcgctcagcatttttaagttcctgcgcatccgcctgggcttttgtcaggcggtagcgctcatagtcgatggtgccgggattaagatctgattccgcagcggcacgtaaatcatcaacctctttacgcagcttttcattttcaatagacgcatcacgctccgcgtaccatgaaatcgctgccgcggtgtcgaacactgcttcgttaccttttcctcctccggaaacaagtggcagcccctggctttgccaggctgtgacagttctgacgtcacaaccaaaaatttcagccagtttttttttattcacgttcatggaaaagtctcccggaaacaggaaaggatctgcgatcttcgtttttaactaaaaacgttatccagcagatcctttctttttttctaaaaaaacctttaaaaacaggaaataaacaataagaagaacggatctggcttttctctgaaaattttcataaggagtgaaatcctgcgacgctgccgccccgtaacaggcagaattcccggaaaggaccctggaaaaaaccgaacagttattgttacaatataacaattaatcattttaacgctgactgagggtcttacatatgaaattcaagagtattgctaaaactgtttttctttttgcactgctaacctcagctggctttgcaactggtaaaaacgtgaatgtcgaattcgataaaggacaaaatagcgcccgctattccggcgtaataaagggatacgattacgatacatataacttccaggccagaaaggggcagaaagtacatgtaagtatttcgaatgaaggcgcagatacctacctgttcgggccaggaattagcgattccgttgacctgtccagatattcatctgaactggatggcaatggccagtacacgctaccggcgtccggaaaatacgaactgaaagtacttcagacacgtaatgaagctcgtaaaaacaaagcgaaaaaatacagcgtcaatattcagataaaataaatgccagcctggtcagggggttcgttccaacaccaaacttttcagccactgggttatttcatgaggtgtaccagtttttagcgtctggttacgtttttgaggtgtacgaaaactggcttatatcagtacgataaaaacgcgatgtggtagtacgcagacccagagacattgtcatgtttatgcatttctgaaactcccccgcaggtaagctccttttccctcctgcgggaattttttatttgcactgcgtccggatgtactcctgcaaatacttcagtttttcctgatcgctgatgattccggcgcggatatcgagaacgttttgtccagcaactggagagagttcgacggtggcagcattgcccacgcggcgggtactggcggttttggttgtggttgtggttggcactgtacagcgtccttcgacacgcacccggctaccagcagcaaggcggcgctgcaaatcagtattcctgttttgtgcatcagctagttcctttgtgtattttgcatcgagggcggcaacgtcacgctggcgcttcgtcatatcggtaattgtctcgttcgccagcttcaggttgtgagtagcagtatcacgctggtacttgtaagtgatagcgttattgcggtagtgatttgccagccgaccggcaacaattagcgagacgagcaacaggccaacaaacatcgttttccagttgaacatcatgacaggaacagagcacgctccgcctcacgccgacgggtaagcccgttcagtaccttgctaccagccttattccagcgcaggaactcatcagcggcgccagcgtaatcaccagcgtttagcttccgcagcagagttgatgtggataatgtccgggcgccgaggttgtacgcgaacgacaccagcgcatcaaactggccttgcgtcaacttgaccttaaccagtctggacacatcattttcataaccgactaaaccagttttaagcaagcgctcggcagtagcctcgtcaatcatcattccgggcttaactggcttaccgtcaacagagtgggtccagccataaccaatcgtccagggatctccccccgttcccgggtccggataagctttcaggctacaaccttcaaactctttgattagggtaatgcctttttcactgattctcatcattaacccctgcacgttttttgagtgcgctaattgcgatttcgcgcagcttgtccacaccgacaaagccaataattccgccaacgaaaggcgaaatggaaaccggcaggcctaccacatcaagcgcactggtgacacataaggaaagagcgccacacaggacgccctcaagccatttatttttacgggtggcgccgtcgtatatcagtcggccgtaggcaatgagtccggccattaacgccccaagtatctggggccacgcatttttgagtccggtcaaaaccgcagcccagaattcaggagtcttgtcattcattttcataagcctcacctccgatgatttcggatggtaactagagtgagtgaaatggttgggttgcagggtttaatatcttgtaaaacaggattgcctgtggttgcagaatctgaaagtaaaatcacgcagagtacaattttaatggaggtgaggcacaaatactgcaaatttagcttttagcttaattgattgcgtgctgagtgaattctgtttgacaaaaacatgctatttatagaatgttaattccatgtaataaaaaggatgtgtaactcatcatgccagcaggaattaaaccaatatttatcaataatatgatgtcaatatatggattatccaatcctcatgacagcaaggtatttccagaccttccagaacaccaagataatccttcgcaattacgcctccaacatgatggtcttgctaccgatgataaagccaggctggaaccaatgtgtcttgctgaataccttatctctggaccaggaggaatggaccctgatatcgaaattgatgatgatacctatgatgaatgccgtgaggtactatcacgcatacttgaagatgcatacactcaaagcgggacattccgcagactgatgaattatgcctacgaccaggaattgcatgatgtagaacaacgctggttgctgggagccggagaaaactttggtactaccgtaactgatgaagacctggagagttcagaaggcagaaaagtgattgccctcaacctggatgatacagacgatgattcaataccagagtgttatgaaagtaatgatggcccacaaccatttgatacaacacgctcatttattcatgaagtagtacacgcgttgactcaccttcaggacaaagaagataacaatccaagaggcccggtagtcgagtataccaatatcattttaaaagagatgggtcacacatcaccaccaagaatcgcctacgaatctagtaattgacactcatcaaaaaatgcaaaatcccacgatgctacaacacagtaaccagttcaggtcagcagtccatagacactggctcctgtcaggatgccacctgctaacccagtaccggaaatcggatcggacattcatccccctctggttgtgtgggtcctctcagttatgaggggaaataaaaaaggccgccgaatggcagcctcaaatggaatatgtattaaattggaggttctaacggtcccgccagaatctcagcctctccgttgtgacaaatgtcatcgccctgcgtcagatgccagacaccaataatagtctgaccagtttccaggtcctcggttacgccgtgggtgtagtaagcaacctgaaccctgccgttgtgctgtatccagtagaagccttctttcattctaatctctcctcttcttaagaggagtttagctattgggattgcaggttggcgttagaaatactaaatcatcaatgaagtatttctctggtccgccatcgaggattcgaaccccgaaccacagaggtagaagctccgtgctctttccagttgagctaatggcggaaaaaattgaccagtgaagtccactggtcatgggtcatgcagttgtctctgcgaaacgggtgtatccccacccagtgttttcagtatcgagagcattatcaaatgccatattaactatagcatcgcagaaaaaagtcatactgataattcccaatgacgcacttctgaaaggctctatggttgtattgcgttgtacatagcgcaaaaaataccgattggcagacttagaaatggaaaaccccgcacgatggcgaggcttgaatttgtttggtcgacgattgaagctatggcgacgatatcagatttacataaaatatagccgttttaatccagttttgcaatcaccacgtcgccagcttctcagcaagcaaatcccttttaatgactatccagccgctatcgcgtaatccgctcaatatctgctctacttttccaacgaacatgtctagaccaacctgccgaatgtctttgacgttaccatcgcggatcttaatcagaaggtcgatgttaagcatgtcgacggcaggctgaacctggcgtgttggcgatggtagtgtctgactgaaatagcaatcctccagtttttcgaacacctcccaagcctgatctgtttcgagcatcttggcgtggcgggcagcgccgcgttctgtccagaggattagggaacgggcatttttaccaactaacccgattgtttcgggtctgttcttgaactcgcgtaattcgtttttttcaattttaaaaaaatgctttcctacaacgaatcgcgtggtgttgttcagaaagttatcagaaatgtttttgatttttgtgccgtataagtgcgccaaaagttcggtagtaataacgggaatttggttatgggtaatcggggaaagagtttcgacagagatttgagtggtcataatgacgccctccggtgattgttttgtttatcaccaccgccgacgccaatcggattgggtggtgagacgtacagggttggcgtaaccagatcaccgaccggcgagcctttcggctcccccatacgccccaccataattcaaatgcgcgtatacaaacgacaataaaaaacacgctcgcggcgtgtctctgtcgcggtgaaattccgggacgccaatcccgacgccagattttgctggcgtactgggaatatagccccggataactgtttgtgtcaattaagtgcgtataggttgaaagccacctgttccgaacgcgactccgatacactcaaaagagacgcctgatcaagacgcagaaatatcgcgcgcatggtcagccagtgtctggtgaaggtttctgaccagttcttttcgctaacgcctaccagtcccgctaactctttatattgataaacctcacgcccggctaattcagatttgacatcctgtgccgccagccagattaatgcccggagtcgttcctgtgttttaccggccatcttctttccgtcgagttgcgccgcaaacgcactccagccccactgtgttatttcgacctggtgttcccagcaggtattctcactgtaattccacaacaaccacgccttgtagtgttcatcgagtgaaagaaccgcccggcgccatgaggcagtggaatattccacaggcttcaccagcgggatagcgcttcctttcgccagcgactgcttgccggggattggcgggttatttaacgttatccagctttctgtttcctcgtcccagatacgctgtttttttcggggatagtttttcgtgtcgaattgcgcgttctccagccaggccaaaagctgccctttagtctccccgcttaaatcggctgtcgctaccattagctgctcacgtacatactggaggtattgagtgttcattgagtaaatcctgtgaactgataaatacgaacaaaattgcgcaggatgcggtagtcaaccaacaccgaccccggacggcggtatatgcggaggcgctgccagcgcatgcggagtatctcgatcagttctggtttcatgcggcctccagcttttttagcgcacgcagatccgccagagccgcgagcctgatttccttcagctcctcgaccgtccagcggtgcggggtgttattgttctcgagtgccagcaccgccgcctcaccgtaacgctcaaccagcgcggtacgatatgcttcgatgttccctgatttgtagacgttgcagacatcacactgaagatggatgttgaagcgagtaaagcgcagatgcccggcggcggccgtactcctgtaatggcctgcatgccatgcgaacgccgtcttcgttccacaggagatgcaaccgagtccttctgccagttcggtttcacggcaaatgtcatttacggcgcgctgcgtcaagtcaatccagtgcttcagcggcttaaccgcggctttccgctggcgccaggcggcgcgttcttttttctcagcggcgcgctgaagggattgcgccttacgttgcgcggcttcgcgagcttttctggtttgttctttgccgacggcgctggcacactggtacgagcaaacgatctgcccctcgcgtatcgggtgaaaccactggcggcattctttgtttgcgcacttacggcgcggtaatttagccatgctcacccccagaccttttggcgtaaggattttggcgtccgcacccggtgtgcatattcaggtaatttcgcgctgacagtccaggtaatgaagtcagggttcaggctctttcctgtccttatgccccgcttctgataatccgatatcagcgtgtcggcctgctcggttgtgcagtcatgatgatggaaccaggagtatttcatcgccatcaccccgcccagctcatgagctgggcggcggcgttctcggcctcgcgctgagtacggaatgtacgtgataaaatccagcgccagagaacatcaagcgcggatttatacaactgctgaaattcgacctcatccatgctggaaaaagcgatgctgcggggatgtttgcgaagggtgccgtccggtaactggatggcgtcatagtgaccagcctcaaccgtcacccatgcgcggtaggcatcgaatgatttacacaggctaatcccgtttgttacccggcggtttgcaatctgttccagatactgttcagccgcatccagtaatgcgctttcattcccgccatatgcagcgagaaactttgcataaccgtttaccagtttgcgctcattggcagaaatggcgccgccggtaggttcccagtattcaaacccaagattaagcaacgcgaaaaagcggcgatggaatgcaggattcctcacctgacggaactcagccaccagcacggcgccgagtttaatttttgactgcagaatttcgctggtctccggcgtagcggggatcagaattccagatgactgcttgatgagttgtaattcgtgcgccatggtattctccgtggcgcataattgtcaggttactggttgttcaggccagtgcgataattatgattgcgtgcttattgttaagtcaattattagagcccatctctctgacaacttccataatggtatccttagaccagtacaaatcatctcttgatagctttcggtttgttacagaaccgttttgggttgataggatatagcgatcacctgatgcaagtctaaaagacaaaagttctattcccttagcatcagttatagtcacccgcaaattatcagcaagatctgataggactccctctgccacgtaacccccctgagcgacacacggacgcggttaaaaattgtcggcagcagcatcaaagggatacgcaaattgcgatattctgaaaaatgcgcgccagcattaagcgcaatgttaataaaaccagtcgtcagcgctttcccacgtttcctgcagaatgctctgtatacgttttttatcgccatcagcagcaccgacgatactcagaccatcctgactgcctcgacggatggttaagttgcagttttcatactgattctggagacgggtaattaattctttttcaagcgcaggaacggcaccttccggaagctgttttgcccggctgataacaagttcaattctcataattccctctacattcaaccactgtatataaacacagtatacctgttagaaagaatattcaaggggtgaatagcactttttgcaaaggctagtgtgttgtttcatatcacattttaggcaaaaaacccgccgcagcgggttcagataaaagaaaacccgtactcggcgggttcacattcattcaaattacgcttacttcttggtgttctgctccgacatttccatatatcgccatgctaactttgtctcgatcttcctgtgattttgctgcaatgttgaaaacagatttatctaatcgcttatagtcttagacatttcgaatttttcaccgattggctttagctcatcaatagccttatagatttcgtcatttgatggttttttaccagaataagcatagttgtaagcataaaaaacatctcctctggtatccttgagctccataacaggaaccttttgaacttttccattgttattacttattgggataaacttggagtcatgttggcttgaatacaaccttggctcttttccttcttcaaaaatcattcgctgatacatgagcttatcctcgtaattcatcaaataattaacaacaaaaagttagtgtgattgtacctaataatgcttttgctttctgctgtggatttaaccagctatcattcctcctgctgaggtgctgccgcaactcgcaaagcatcttcaagatttgtgacgtattcagagatggccacctcatcctctccaaactcatagagcacgtcaagcagcgccagcacggtggcggggttagcggcggcaataaattccgcgtcacgtttctcaacagtatgggccaacgtcacttcttcaccgcaaagagaaaatggcgttaccgtgatgccattgaacagtgatgaggtgcggcgccaattccccggcgtagccctctcagccacttcacgaagcgcccgtttgtcgatgttgctcattgggctccccccttgttgatgctcattttggatgctccataaacctgcattaccgggcttttctccagcaccggcagcgctgaaaatcccgttacctgactactgctgtatcgcctgaggtcataatcaatcaccgcacgctggtctcggaaaatgccgcagcggccatgacgaatgaagccgcctcgctccagcgcgatacgcagatatttctccgccgtggttcggtgcacgccaaaaatcgcaacgacgtcgttcgtcgtgatgcgcccctgctctttcaccagaccgataatccgctcaagaataatcatccgttcgctttgtgttttaggtcgggccatttttaaccccttatttcacaatccggaggtggctaacgtttttccggtagctttcccagtcaaaattcacccacatccctccgtccatctggaggcgatcgataaccctcgcgcccagtgaatccaacagcccctcgtggttaagattcgtcagaacgccaacaggtcgcatcgatgagagacggcgatcgataacctgattgagaatgaccttctcaccactgcttccgcgctgaataccgacttcatccagtaccagcaggtcaactttacaaaggtcatcaagcagggacgcttctgattgcccaccgtcgtagcactcacgaaccctgagcatcaggtcaggaatagttaccaccagaacgctatgaccgccggccagcagatgatttccgattgccgccgcaagatggtttttcccggttcccggaccaccgctgaacacaaagctcgcaaatccactaccgaagttctgggcataactttttgccatcgtgtacgcttttcgctgcccctccccgcttacttcgtagttagcaaacgtacagctacgatggagatcctgaatgccagatcgcccgaaaatcttctcggtgcgggatttctgattcatcctgtcaagctcttcactgcgtttacgcccttcggcttcctgccatgcccgccactcatcagcagtcgagaatttcggctgcacactggctgggataattcttttcaggcgatcaagcgcactgccagtaccgattacgtttttcatcgttaccccctgaatccggtaggaatggttttgtctggcgcagaaatgtggttcacatctctgccagctcttcggtcgttgagagcgaacttcggtttgaatagtccctggtagccgttggcaatgcttgtgttgatgacgtttaccggatcgtggccttcatccaggcactccttcagaagcctgaaagcttttgttaccgtcagttcggtttttatgggctttccggattgctggcggtatgtgacccattcgttccacgacgcagcattcagccattcgggaacaggaatactcaacggatcaaacttcacttttcccttagggggattaaagggggttagatcttttatatttgtctttggaataatgtctttggtgttccctgttttcggggatgcccttccctcttttcggggataactatccccgttttcagggatggctgaatggggtaaaacgctatccctgttttcagggataactatccccgttttcggggatgcccttcccccttttcggggataactatccctggtttcaggtacagaaataatccatgtggcaatttcatcatcaggaaaagacaccggacattttgagcaatgtggcttggaataagcccatttatccaggtttgtattaatccctatgtatcttgtttgaccaatacggcgcaggataatgatgttacgataggcaagactcagcaccgcttcggatacatgctttaccttcagtgttgtcttatctgcaatgaggctgttggcaatacgatctgattttttcgaccagccataagtcagccggataatcgcattcaaaacacggaactcacgccccgatagttcaacgatacacaaggcgtcctggatctgattagctaaacgtaaatagccattttccagatcagccatacggcactcctgttgcgtcggtatcggcgcagggaatttgtatatttcagcggtatttgacatactcatctccgcaattacctaccgtttttgcaccagaaagccgttggtgacccctcaccgcggctttcgcctttttagttgctgccattttcagtcccaccccagcgcatccggcctggctcgttcagcctttagcccggcatcagcgagaatctctactgctgtgagatagtttctggataccagtaccgcttccggtggcgcggcctgaatcccaagaaaagccagctctttcgccatgttgcagaaatatccctcagctttacgcctgctgactgtcgactcgctgatgcccatatgctcggcgtatgatttctgccctactgatgcaagccggttgagcaggacgctctctatctcaatcgggttgatttctggtgggtctaactttcgtgcaattgcgttctccatgggtaaatatcctctatggttatttggctgatgcctcttggcttggtaagccatcggttgggtttgggtatgctgctgggtcaatctcgtgaggagtgactttccattcaagaatttcacataacggcaggatgcgacggggaggaattactccttttctcagccacttgcctacagcttgagacgagataccaaaatgttcgccgatgctcatttgagtcatgtggttactgattttgatttttaattggttgtccatttggctctccagttctacgagttggtagctggagattatcacgtaaaactttaggttccaacaaaaatcaatctaatagttccaatgaataaagaaactgaaggttgtaaaatgtgaatatgaacaaaaatcttcatcccattttcgccaagcgtatccagcaagttctggatgagaacggctggtctatggctgacctctcacggcgcgtaatgctttctcacacatctgtgagaaagtgggcctctggcacgtctgtagccagcggagagcgcttgaaaaggttatcggcggtgaccggaaggcctgaatattggttcttcatggagccaggggatgaaagtgaaggcgaaagggctgaacctaaacccagagtccttgatgaaaaagaagaaacattgctttctcttttcaatcaactcccggaagcagagaaactgcgtgttatcctccatacaaaagcagtcctccaagagatggatctgctgaagaacaacgtttttgatctaattaacgacctcaaaaaatagaaccaaagaactcatccatacaggtagcacctctttaggtgctatttttatgctccaagatagaacttttagttgcactttttgctttacaaatcgaacctttggttttatcgttagtttcatcgacaacaagcgcatcgttgtcaggtgtaaaacgttccgctggccggcgataaggcaaacgagggtgagaatgattgatttcgcacgtaaaccagctcgacagcaggccgtcccgctcaaccggattgaggttttaatccgccgcctctgctacctgctggcgcagaaaggagatccggatgcttaaacaatgcggttactgccgcaaatccattgatgaaggcaaagaagtaaaaaacacccttctctatctcaacggctcgcaactggcgcgcaaagaaaaggaatattgttccaggcagtgcgctgaatacgaccagatggcgcacgaaagttaaatagtagttccgaaatatgaaatgaaaaattcgccattaatttggcgtggcttcctacaccctgaatttaagactggagaaattatggaaatcgtaaaaatcgaaatgaacctgaaagcagttaataagagcattgctttattcaattgcgaaaagaaagtctcaggcgttattcactcaaattcaactggcgaaaccactgtgattctcgacggtggatatgtactcggaaagttcgactgtcctcattgtgctgtaaaagccatttcgctgctcacagtcaaggtaagtgatggagaacaagcagggtttggtaattaccgaagttacaagcttgattactcagaaaaattttatcagaccatccattaagaaaacgcccaccgaagcgggcgtgccctgtccggtccaaccgaccaaagcgaaccggacctaacaaccagatatatcggggtgctgttaaggcacctccattctacacgaattgaggacaaaacaatgagtggaactaatcctgtatttttagtccgcaaagcaaagaaatcatcaggccagaaagacgctgtactctggtgcagtgatgattttgaagcggcaaatgcaacactggattatcttctgattaaatccggtgcgaagctgaaagattatttcaaagctgtcgctactaatttccctgtcgttaacgagctgccgccggaaggcgaactgagcctcactttctgcgattactatcaactcgctaaagacaatatgacctggacgcaaatccccggcgtcaccctgccatcatctgaagccgccgccgcggcgcgccagcatatcgtcgatggtgttgataccgaaacaggcgaagtgctggaagaccacaccgaaaattttggtaacgaaagcaacagccctgcccaggcaacagccccagcccccgagctgactgttgtcgcaactatgcctctccgtcaccgcgttcttgctcagtacataggtgaaggtgagtatctttatcacgtcgacgcctcccagaaaaaagaaattctgcgtctcgaaatggacaccgataattcatatgtccagaacctgctgcttgccgccgagaatgttgaagcgttcaagaaagccattgaacatgacattcacaaaatagtgaatgccgttaaaaaagtattccctgtcgatggaaaaactcctgaactggcgactgttatccagttccttaaaacatggttcgagacggagcatatcgatcgcggtttgctcgttaaggagtgggcgaaaggcaaccgtgtatcggctattcaacgcactgaaagcggcgccaacgctggcggtggcaataagactgaccgtaaccctgattacgaacacactctcgatactctggacgtagagattgcaatggccactttgcctatggactttaatatctatgagctacctggcagcgtttaccgtcgcgcaaaagaaatcgtaaagaaaaaggaaagtccgttcaaagaatggtccgcagcacttcgcgcaacgcccggtatcctggattattcccgcgccgctattttcgcgctgatccgaagcgcacaccctgagttttatcactaccccggacgccttcaggggtatatcaacgccaacttaacggagactgatcacgagaaccccaccgaggaagctctcacggctgcccgacacactccggaaaaagacgcggtagaagaagccaaccgacagcttgccgccgcgcgcggtgaatatgtggaaggcatcagcgacccgaacgacccaaaatgggtgaaaaccgggacaagccagccgaccaccgaacctgaactggttaaaaatgttggcaacggtattttcgacgtgtccgctttaatgcagaactcatcaactcatggcacagaaacgaatccggagaccaccagcaatgtgcaggttcaaaaagctgacagtgatgaaaaacaggctggtgatgcggtgcaggcaggcgaagacgatctgggtactggtaaagaagcagttaccgtagagaaccagaatcaggctgaggcgcaacaaaacgtaccggaatcgcaacaagaagagccagaagcagcctggccggaatacttcgagccgggccgctatgaaggtgtaccaaacgaagtttaccacgccgccaatgggatcagctcaactcaggtgaaagatgctcgcgtgtcgctgatgtactttaacgcgcgtcacgtagagaaaactatcgtcaaagagcgctctccagtgcttgatatgggcaacctggtacatgttctggctctacagccggaaaacctcgaagcggagttcagcgtagagccggagatccctgagggtgctttcaccaccaccgccaccctgcgcgagttcatcgacgcgcacaacgccagcctgccagcgctgctgagtgctgacgatatcaaagcgctgctggaagagtacaacgccaccctgccgtcgcagatgccgcttggagcttcggtagatgaaacctatgcatcgtatgagcagcttcccgaagaattccagcgcattgaaaacggcaccaaacatacagccacggcgatgaaagcctgcatcaaagagtacaacgtcaccctgcccgcgccggttaaaaccagcggcagccgtgacgcgctgctggagcaactggcaataatcaaccctgacctggtcgctcaggaagcgcaaaaatcgtcgccgttgaaagtctctggcacgaaggccgatctgattcaggccgtgaaatcagtcaacccggcagtggtattcgccgacgaattgctggatgcgtggcgggagaacaccgaagggaaagtgctggtcacccgccaacagctcagcaccgcgctgaacattcagaaagccctgctggagcacccgaccgccggcaaattgctgactcacccaagccgcgctgtcgaggttagctattttgggattgatgaggaaaccgggttggaagttcgggtacgccctgaccttgagctcgatatgggcggcctgcgcattggcgccgacctgaaaactatcagcatgtggaacatcaagcaggaaggcctgcgtgcgaagttgcaccgggaaatcatcgatcgggactatcacctgagcgcggccatgtactgcgaaactgcggcgctggaccagtttttctggattttcgtcaacaaagacgagaactaccactgggtcgccatcattgaggcgtctaccgagttgctggaacttggcatgctggaataccgcaaaacaatgcgagagatagcaaacggcttcgacactggtgaatggtcagcgcctatcacagaagactacaccgacgaactgaacgattttgatgtgcgccgccttgaagcgttgcgcgtacaggcataaggggaaaatcatggaaaacacaaatattgttaccactgagcagcaggcaccaaacaccatttctgccagtaacgcaatttttaacgttcaggcactgggtcagttaacagctttcgctaacctgatggcagactcacaggtgacggtaccggcacaccttgcagggaaaccagccgactgtatggctatcgtcatgcaggctatgcaatggggcatgaacccttacgctgtggctcagaaaacacacctggttaacggtgttcttggttacgaggcacaactggtcaacgcagtaatcgcaagctccagtgccattcatggccgttttcattaccgctatgggggtgactgggagcgctgcaccaggacacaggaaatcacacgcgataaaaacggtaaaaatgggaagtacaccgtcactgagcgcgttcgtggctggacagatgaggacgagatcggcctgttcgttcaggttggtgccattctgcgaggtgaatctgaaatcacctggggagaacctctttacctctccggcgttgttacccgcaattctccgctatgggtttcaaaccctaaacagcaaattgcctatctgggcgttaaatattgggctcgcctgtactgcccggaagtgatcctcggcgtgtacagccctgatgaggttgagcaacgagaagaacgcgagattaaccctgctccagtccagcgcatgagcgtacaggaaatcaccagcgaggttagcaccaggaccagcgcgcaggagtcggcagctaacgttgatgctgttgccgacgatcttcgcgaacgcattgatacagcaagttccgttgatcaggcaaaagcaatccgtgcggatatcgaatcacagaaagcgttgctgggtactgcgctgttcaccgaattaaaaaacaaagcagtgaagcgctattaccaggtcaatgcacagaacaaagtcgaggcagtgatcaactcaattccaaaccctggcgaaccggaagccgcagagatgtttgctaaagctgaaagcacgcttggcgctgctaaacgtcatcttggcgacgaactgcacgataagtaccgcgtcaccctggacgatatgaaaccggaatacatcggctaattgcatcgggagggggtacgccctcccacctgaggaggttttatgcgcctaataaatcgcagtaagcaatcgccattgggccgtcgcgcatgtgatgttgcactggcggcgcatcatgaaaagttcggcgattacggcagacaaaagcacgttaccaattacaccgttgtagtggatggcgtaaaggtgcctgttgaagtagttaaccgggccaccagctacgtagccaccgcaatgatcggcgtccggaaacttagaaatctgccagcacaggcaaactgaatattagcgatggcccgctgcggggccactggagaaaacgatgagcaaaaaaattagagactttgaattgatgagcacccgcgaaatttgctgccagctcaggatttcttccaggacgctggagcgttaccgtaagcgaccaagcgacaacaacccattcccggagcctgactgttcatatatgggtggctccaacaaatggcttaaaaccaaagtcaatgagtggcaggtcagggaaatgtcacgaccaacacgccgtccaatgtcgcatctgaatctgccccgtgacaacaaaggtcgactcatccggtctgacgtggcgtgaactccagaacatcgggctcgatgatgctcatcagtcgggcccaccatttactataagcttctctcatttcttcgatataggtgtatttgtcgtacaccgaccacactccaggcagtttgtgcccgagcatcatctcagcaatatgtggttcagtcagctcggagaaattcgttcgcgcagttctgcgtagatcatggatcgtaaagtgcggaacctgctcgttataagccttcagcatgaacttaacaaggttgctgctgatgctcatatgaaagccttcgctcatcggcttgtctgcatattttgagaaaacaaaacggcctggcgccagctcaatggctcgttgtatcagcgggagcatttcagggatgatcgggcggattatcggcttcttacttttccgtcccgttttatgattttcccacggtacggtccagacgccctcctcaaaatcgaaatgcgaaacttcagcctgacggagttcaccgaccctgcacgcccatatcagggacaatttataaaggatcttgtttcgctcaataaggcgggaatcctcaatagctcgccagacaatcgcaatttctttgcgatccagtgttctctcccccattttcttctgaataccaaaatcacgaccggacatttcagaaagtgggttaacctcaagcaactggcgcttcactgcccatgagtagcactgccgaccgttactaattactcgccgggtgatctcagtgtatccctgcgccagtcggtccagaactgtaagccagttgtgcagcgtcaactgatgcgccggatacttacccagcttagggaatacatgcagctcaaacgaacgcagtatttgatcggatgtttctttctgaacgcataccatcgcatgccattctctgaaaagttcctcgaatgtgtactggctgttgattttagctttatcgaggctttgcctgatccgcggattttctccccgggcaagaatggcggcccacttagttacctcttcgcgcgcggccttcaacccgaattccgggtaactgccgatcgtcatcttgtcctgcttacccaggaaacggaatcggtagaaaaaagtgacggcgccctttttggaaatgcgcacccacagaccgtcccggtctgccttctcctcaactttatcgcgttcgcgcccgaggcacgactttagataactatctgaaatagccatgatttatccctgcatgtgtccatcagaacggaagattctgtgtccatcataggatatggacgcactggtggacacaaaaaccatgactcatgatgtcgtaggttgactgtacatgcaaccagtatcatttttgtgagcgcttattttgcggggatcttgagaggattttgtcgtaggtttgcggagggtggcggggtatcaattatcgatgtgagcaatgatcgaaaagttacgtatgttcttcatagagataaattattatgccttacgcctggttgaccagactttagaggtcgctgttctgagcttaacgtctgttttaactgaaacgccgcattctacactacaacgctaaggcgaggaaatgttcatagtgtaaggagagcgggaactggaaaacgcctcgcttttttcctgtaaaacaccgcaacgcaggaaaagcgcatgcttatcgggacaacaacccaacgcggcaggtgtaccgttgggcaaaacgtttactggcgcgtttcgattgaggtagtttcgacgcgaacaaggtcaggcgggagggcaacgtttaaaatcaccggctgccaggcgtcgcgctccgccagttttcgggaataaccgcgggcaaccagaaaaccgcccacgccgcccagcacggccccgcttaatgcggcaaggtcagatccaaacagcatctgaaaaagcgccgcacaaagaaatagccccgctaaaggcgacatatagaccagcaacgccgaacctaaaaggcttttttcggcgatgcccaactcgactttctgccccggcgccagcggctccgcgcttggcacaacaatggtatgcgtggtttgcggccctaatttattcagcacgcgactgccgcatcccgcacgggaggcgcagctgctgcatgacgctttaacgtcgcagctcaccaccgcctgaccattctgccaggagacaacggttgcccactctttaatcattgtactgccctgaatttgatactgtcggcaatgcgcttcgccgtttgcggcggaagctcgccgacaatggtgatttccgcgttgtcgcgaacgctgctataaaccgttcggcgcccggtgcgcagcatctgatcgctgctgttttgcgtcgcccggttcacattgacggaaaagctaaacagaccgtcagaataaagccgcgattcgataggcaggttatccatcgtcggcaacggacgacggctgctggaaacttcgctaaagccttgcggcacccaggatggactccagttaaatttcgttttttcgccaccgggaacagaaagcagcggcggcagattcgccttcgccagcgcctgcatgttgctgccgatatcctggctcaccgtgaacgcaataacgcggaactgctccagcgtctcgccatcgcgatccagcagatcaacgcgcatcggcagtttggtgtccatgtccatccagacgatatagctgtaacgcgtaccatcgcgcgccacaacgcggataacttcgcacaatctgtctgcgatacgggtgcgtccgacagaaataaagtcgtagtaaggcgccaggcgcttaaagtcggtgtaaatcagggaaggcagagaatcgacaatataatcaccgttcagggtgaacggctcaaggcccggttcaaaataactgatttcattaccacgctgtacgacctcccggcggggaccgtccaactgtagcaattgcgcaagcgggcgaccatccaggcgtgcgtgtcgataacgcagagattcaacgccttgtttcgtgatgctgacgaatgacagctcgtaattcagtgactgactggcgatgttcatctgctgcaataacgccccggacgcagggtcggccgaggcgtttgctgagaagaacaggctagccgccacaagggacatggcaaaccaaagttgcttcattactgcgattgcgttcctaaagtttggattcctggcacctgtaccgcggcttgctgggtttgcgcctgctcaaactgaagctgttcggagtgcagtcggcgctgcagttcatagtcctgcaacatggcattaatgcgacgacgctgctcctgtacctgctgttgctgactgccgacaggcgctgcttcagaaggcactcccagacttaccgggctggctttccccatcataggcagggtattgaaaaccggcgtttcaggttgttgggatgtttcagattgcccattatagtgctggacaccgacgataactgcaagtgaaacgcacgccgccacgcccatttgggtaagctgcgccgcccacggacgcacttttttccagaacggcattttctgccattgctgcggagcgggttgggcctcagggattaatggcgacacctgacgtactggctcgttttcaatagcggccatcacgcgagcggatatatcgaaatggagaacgtcaggcgtatccccccgcattgaatcgcggatcaggtgataactctcccaggttttctgcatttccgggtcgtgcgtaagcgctttgagcagctcactatccaacgtttcgccatccatcaaagcggaaagtttttctttctgcatgcctaataccttttccagtatcccgctatcgtcaacgcctgataagcggttgaactttattatcaatagcttcccgcgcccggaagatacgtgaacgcaccgtccccaccggacaatccatgatagccgctatctcttcatagctcaggccatccagctcccgtaaggtgattgccatacgtaaatcttccgggagggactcaatagttcggaaaactatctgtctcagttcttctgacaacattaagttctcagggttcgaaatttctttcagcgcgccgccgctttcaaagttttctgcttcaatcgcgtctacatcactggaaggcggacgacgcccctgcgcaaccaggtagttcttcgcggtattgaccgcaatacgatacaaccaggtataaaaagcactatccccccggaaagaatccagcgcgcgataggccttaataaatgattcctgtacgacatcgggaacgtcgcccgatggcacatagcgggaaaccagactcgccactttatgctggtagcgcactaccagtaagttaaaggctttctgatctcccttctggacccgttcaaccaggacctggtccgttaactgctcgctcatccgaggtaatgtctccccaaaccaaatttccacgcgctttcgaaacgccactccataagccgcactatgagcaagcaacaggttagagtgtctatgtttcgtaaagttccgttacgcatttgtttttgtttgtcatgttgtagacaggtcttatcttccattataagtctacagatgctgaacaacgcactatctgtacagaaatgcccatttcgtcgtttgcagagtaacctaacagcatctttatttcactacaaaatccgacgctaacaccctgccctataaaatattttttgccgtttatctctcgccgtatttttattttatgtttaataagcacaacaccagcgaaatcataacgtgctttttagcgccatatagtgctaatctgccgcaaccatgtttagtaaattaaacaagaaccatgatgacaactcctgaactgtcctgtgatgtgttaattatcggcagcggcgcggccggactctcgctggcgctgcgtctggctgaaaagcataaggttatcgtcctgagtaaagggccggtgagcgagggctccacgttttatgcgcagggcggtattgccgccgtgtttgatgaaaccgacagtattgcgtcgcatgtcgaagatacgctgattgccggcgccggaatttgcgatcgccacgcggtggagtttgtcgccagcaacgcccgtacctgcgtgcagtggcttatcgatcagggcgtcctgtttgatacgcatgtccagccaaacggcaaggagagctatcatctcacgcgtgaaggcggccatagtcatcgccgtatccttcatgccgccgacgctaccggaaaggaagtcgaaaccacgttggtcagtcgggcgcaaaatcatcctaatattcaggtgctggaacgcagcaacgccgttgatttaattatctccgataaaatgggtctgccggggcctcgccgggtcgtcggcgcctggatctggaatcgcaataaagagtgggttgaaacctgtcatgcgaagtcggtggtgctggcgaccggcggcgcctcaaaggtttatcaatataccactaacccggatatttcctccggtgacggtatcgcgatggcctggcgcgcaggctgtcgggtcgctaatctggaatttaaccagtttcatcccaccgccctttatcacccgcaggcgcgtaattttctccttaccgaagcgctgcgtggcgaaggcgcataccttaaacgtccggacggttcacggtttatgccggacgttgacgaacgcggggaactggcgccgcgcgatattgtcgcccgcgctattgaccatgagatgaaacaactcggcgcagactgtatgtttctcgatatcagccacaagcctgacgattttgtccgccagcacttcccgatgatctatgcgaaactgcttgatttggggatggatttaaccaaagaaccgattcccgttgttcctgccgcacactatacctgcggcggcgtggtcgtcgatgattatggtcgtaccgatgtagacggcttatatgccattggcgaagtcagttacaccggcctgcacggcgctaaccgtatggcgtccaactcgttgctggaatgcttagtgtacggctggtccgcagcaatggatatcgacaggcgaatgccttctgtccacagcgttgacgcccttcccgcctgggatgaaagccgcgtggaaaacgccgatgagcgggtggtgattcagcataactggcatgaactgcgcctgctgatgtgggactatgtgggcattgtgcgcacgacgaaacggctggagcgcgccctacggcgtattaccatgttgcaacaagagattgacgaatattacgccaactttcgcgtctcgaataatttactggagctgcgcaatctggtgcaagtggccgaactgattgtgcgttgtgcgatgatgcgtaaagagagtcgggggctgcactttacgctggattatccgcaacaactggctgaatcaggcccatcgatcctttcgccgttaacgcctcacataaatagataaaatgcctgggtcagcgccgtataactttcagaataatgctggtctgacccgcgaattactaatctgtcgctaaagcactccccggcttgcggggagaatgcgagcaaaacccggtgcggcaagcgcgcttcgttttccgcaacgtcagtacgtagccgcaaatgccatcccatgttgagcgcttgctgcgtaaaagcgttacctatttgttccggcaagactacgcaaaaaaagccatcttcggtaatacaatccgccgcaatagccaataacgtctggtgatccagcgtagcggtgtaacgcgcctgctcccgctgcggcgtggcgcattccacaccgggttcgtaataaggcgggttgctgataataagatcaaagcgtaccgtctggcgaggcgcccaacgctgaatatcgtcagtatgcaccgttattcgatgcggccagggagagtgagcaacgttttcctgcgcttgcatggcagccccggcatccagttccacggcgtcaataggcacattgtcatccgtccgctgcgccagcattaacgccagcagaccgcttccagtaccgatatccagaattcgctttacatccgcgaccggcgcccacgccccgagtaaaataccgtcagttcccactttcatcgcacaccgatcgtgtgcgacaaaaaactgtttaaacgtaaatccgttacgacgaagaacggagccagactgagacatgtaaaaacaaccttgcaaaaaaacggcgacagcgccgggtgaaaacaatacctgagaagggatatccatacaaacagatgaagattgcggccgtaacgtctataatcagcgccccacacagaggtagaacatgactgtaacgactttttccgaacttgaactcgacgaaagcctgctggatgccctccaggataaaggtttcactcgcccgaccgccattcaggctgccgccattccgcctgcgctcgatggccgtgatgtactcggttctgcgccgacaggcaccggtaaaacggcggcatatctgctgccggcgttgcagcacctgctcgactttccgcgtaaaaaatcggggccgccgcgcattctgatcctgacgccaacccgcgaactggcaatgcaggttgccgatcacgctcgtgaactggctaagcatactcatctggatatcgccacgattaccggcggcgtggcctatatgaaccatgctgaagtgtttagcgaaaaccaggatatcgtggtcgccacgacgggccgtctgctgcaatatataaaagaagagaactttgactgccgggcggttgaaacactgatccttgacgaagctgaccggatgctcgacatgggcttcgctcaggacattgaacatatcgctggtgagacccgctggcgtaaacaaacgatgctgttctccgccacgctggaaggcgatgcgattaaagattttgccgagcgcctgctggaagacccggttgaggtttctgccaatccgtcaacccgcgagcgtaagaaaattcaccagtggtactaccgtgccgacaatttcgaacataaagttgcgctgttgaagcacctgctaaaacaagacgatgcaacccgttctatcgtgtttgtacgtaaacgtgaacgcgtccatgaattggctgaaacactgcgtctggcagggatcaacaattgctatcttgaaggtgagatggcgcagatcaaacgtaacgaaggtattaagcgtctcaccgacggtcgcgttaacgtgctggtcgcgaccgacgtcgcggcacgcgggattgatattcctgacgtcagccacgtcattaacttcgacatgccgcgcagtggcgatacctatctgcatcgcattggtcgtacaggccgtgctggccgcaaaggcactgcaatctcgctggtagaagcccacgaccatctgttgctgctgaaaatcggtcgctacatcgaagagccgctaaaagcgcgcgtcattgatgagcttcgcccgaccacgcgtgcgcctagcgaaaagttgaccggcaaaccgtcgaaaaaagtgctggcgaaacgcgccgagaagaaaaaagagaaagaaaaagagaagccgcgcgtgaagaaacgtcaccgcgatacaaaaaatatcggtaagcgccgcaagccaagcggtacgaaaatgcaggagcaatccagcgaagagtgatgataatgccgggttcgttaacccggcatttttttatcttccacggtaaaacacgcctccatacactgcataaatatctgcattgccgggctgaccgctttcccggcatgatgggcgcacagcgccatgatcgatagcgacggcgcgccaaacggcagctctttcaactgaccggtactaagttctcgttcaacggcaaaacgtggtaaaaagctgatgcccaggttagcagccacacactgtttaatgctttcaatactccacagttcaatggtgttttccagcgtaatccgcctctgccgtagcgtactttcaaacagctggcggaagacacattgcggttcattgatgatgaagctacagggaatatgctgatctggctgcgtaaaatcagcatcctgtagcagtggagaggccaccagcgccagcgactgcttccccaattgctgcatcgtgagcgcgtcatcattacctacgcgataaaaaacgcccagatcgacctcgtcattcagcaacgcatcacgtatcacatagcaattcagcgactgtagcgacaatctgacattcggcgctcgcagcttaaaacgttgtaaaacctgcggcattttgtacgccagtaaggtttcacctgtcgccacgcgcagctctccgccgggttccgcatcctgtcttgcggcttcacgaatcgactccatcacacgcgtcagttcatggatatgcggcatcagctttttcccctcattggtcaggcacattcggcgccctattttctcgaacagttgcagggaaaactcacgttcaagctgttgaatatgaaaagttaccgtcgactgagtgcagcacagcttttgcgaagcccgcagaaacgagccctcttccactaccgttttcagcgtaataaaccgacgcagatccataaccaccaacctatcgaaaatctcgaattcagaattaaaaaacattcatttttttaaatatttcatatcgggtactgtctgctaaaacagaggagatgacaagtgacaccgatgcttttaagcgctttctggacttatacattaatcaccgcccttacccccggccctaacaatattctcgcgcttagcgcagcaactgcacatggttttcggcagagtattcgtgtactggcaggtatgagtctgggatttttggtcgtcatgctgctgtgcgccgggatcgcgttttcccttgcggttatcgatccggcaatcattcatttgctcagttgggtgggggctgcgtatatcctgtggctggcgtggaaaattgctaccagtccagcggcggatgagaacgccagaccaaaaccggttggcttttgggtaagctttggtctgcagtttgtgaacgtcaaaattattctgtacggcattaccgctctgtctacatttgttttaccgcaaacgcaggcgctgaattgggtcatcggcgtcagtatattgctggcattgatcggcacgttcggtaatgtgtgttgggcgctggcgggacatctgtttcagcgggcgtttcgccattatggtcgccagttaaatatcattctggcgttactgctggtgtactgcgcggtgcggattttttactgacccaaataaaacaaaagcggaaaaggcccggcctcttccgcttgttattaccggataagccttacaggctttcggtaaaggtacgagcgataacgtcgcgctgctgttccggcgtcagggagttaaaacgcaccgcataaccagaaacacgaatagtcagttgcgggtatttttccggatgcttaaccgcatcttccagagtttcacgacgcagaacgttaacgttcagatgctgaccgccttcaacgcgtacttccggtttaacttccatcggaatttcacggtattcaatctcgcccagtttgctgacagccacaacttcatcttcagcaaagccggattttgcaacgatgcagcgcgcttcgcctttttcgctgtccagcagccagaaggaattcagcaggtcgtcgttagcggctttagtaatctggatacctgtaatcatgtgatgcctccccaggcaaaattatttgatttcggtcggcctaatcccggccaattggtaaaaccattgttgcttgagtgtatatatacccttcgatcacccttcattctttgatttaaatcaataaaaaccacaccacaaaaagggtgatgaagggaatttattgttttacatcaacttacaccattcagacctataaactttttacataaattttcaactatcttttgtaggtaaccgtttttgtagcacgcaggattttgcactgcagaaagaagcagttaagctaagggaactggaaattcgcaggagagcgagatggcgactgagttaacctggcacgatgtgctggctgatgagaaacagcaaccttactttatcaatacgcttcacactgttgctggcgagcgtcagtcgggtatcacggtctacccgccgcaaaaagatgtgtttaacgcctttcgctttacggaactgggcgacgttaaggtggtgatcctgggacaagatccttaccacggccccggccaggcacatggtctggcgttttccgtgcgtcctgggatcgctcccccgccatcattagtgaatatgtacaaagagctggaagcctccattcccggctttgttcgccccgcgcacggttatctggaaagctgggcgcgccagggcgtactgttactgaatacggtgctcacggtacgggcaggccaggcgcactctcatgccagcctggggtgggaaacctttacggataaagtgataagcctgattaaccaacaccgcgaaggggttgtcttcctgctgtggggctcgcacgcccagaagaaaggcgcgattattgatccacagcgccaccatattctgaaagctccgcatccctcgccactctctgcgcaccgcggattttttggctgtaaccattttgcgctaacgaaccaatggctggaacaacacggcgagaaaactatcgactggacgccagtattaccggctgagagtgaataacgttggcgactcgccgttttatcgcccggataacggcgcgaaagcgccttgtctgaccgggcggtagaaagtacatcattggcccggcgcgcgttgcgtcaccgggctgcagcccttacgctttattctgtcgccaccactcggcgagcagtacgcctgtcgcaaccgacacattcaggctttccacgttcccggtgccgttaattttcacgcacagatcgtcgggttcgcgcgccgcttccggcaggtagtcatattcacggcctaagaccagcaccatcttttccggcagggtcgtactaaagagcgcctgaccgcgatcgctggacgtcgtcaccacggtgtaccccgcctgacgaaaatcatccagtacgtcaacaatgctttcaccagtgatcggctggacatgctccgccccgccttccgcggtacgaatcgccgcgccggactccagcaacgccgcatcctgtaccaccacgcctttcacgccgaagtgcgcgcagctacgcatcatgccgcccagattatgcgggttagcgacatcttccaacgccagcacgcagtcttgatccgccgcctgctttacccattgcttaacggtcgtaccgttacgctttttaatcaggaaacacacgccaccgtggtgctcagtcccggaagcttttgccagttcggcttcatccaccacatggtaggctttacgattcgccgccatccagcgcagcgcctctttaaaacgcggcgttacgctttggataaaccatgcgcgcacgatggcgtcaggacggctctggaatagcgcctggcaggcgttttcaccgtagacgcgcgtctcttccgcacgctggcgacgcaaaacttcagggtcaataaaacttttaccgctaataccaccatgatcgactttctcaggcgtttcatcgcctggcgcgcgggacacggtgcgccacggcgaagtttcatgtttacggtcacggctctgattatttcgctcatcacgggcggggcgacgtccaccgtcagtgcgagactttgctgggcggcctccccctttcccggtacgcgggttatgggtgcgtttatcagagtcatcatcactacggacatacatcactttgactttgccgcttttgttttttaattcatcgttcatgcttttctccaccagcgctgcgcgaagcgcgaagattacccgatgtgcatccggttagccatgatttcgtttaaaagcttgcgactattgtactcattgaataaaacacattgttgtttagcacagactcctcgataatatgtaacattatagaaacatcccgcgcgtagcgggacgtcttccgacgtattcagaggttagctatgaacaccgtttgtacccattgtcaggccattaaccgcatccccgacgatcggcttcaggatgcggcaaaatgtggacgctgcggtcatgagttgtttgacggagaagtcattaatgcgaccggcgaaacgctggacaaactgttgaaggacgatcttccagtggtgatcgacttttgggccccctggtgcggcccttgccgtaactttgcgccaatcttcgaggatgtcgcagaagagcgcagcggtaaagtccgtttcgtcaaagtgaataccgaggcggaacgggaactcagcgcccgtttcggtatccgcagcatcccgacgattatgatttttaaacatggacaggtggtcgatatgcttaatggcgcagtgcctaaagcgcctttcgacagctggctgaacgaagcgctgtaaacgccacggggcgcatcttgtgccccgttttcacctctgccacaatagcgtttttctccgcaaacgctttctatgaccaataacgctgtccttcagttacgcgccgaacggcttgcgcgcgctactcgcccttttcttgccagaggcaatcgggttcgccgctgtcaacgctgcctgctgccgctaaaatcttgcctgtgtgatacgttaacgccttctcaggcgaaaagccgtttttgtctggtcatgtttgacactgaaccgatgaaacccagcaataccggccggctgatagccgatattttgccggataccgcggcgtttcagtggtcgcgtaccgagccgccgcaggcgttgctggagctggtacagcatccggattatcaaccgatagtggtctttcctgcgtcctacgccggcgaagcgcgcgaggtcatttccaccccgcccgccgggaaaccgccgctgtttattatgctggacggcacctggcccgaagcacgtaaaatgtttcgtaaatgcccttatctggatcatctgccggtcatttccgtcgatttatcgcgtctttcagcttatcgtctgcgtgaaatccatgccgaagggcaatattgtaccgccgaagtcgccatagcgttgttagatctggcgggagataccgaggcggcaaccagtttaggtgaacatttcacccgtttcaaaacgcgctatctggcaggaaaaacgcaacatccgggaaacgtcacagcataaaatagcgaaagcgtttaaaattatccggtcacttctgtgtaagggaaaccggtatgagccagcaaggactggaagcgctactgcgaccaaaatcgatcgcggtgattggcgcatcaatgaagccccaccgcgcgggttacctgatgatgcgtaacttgttggcgggcggattcaatggccccgtccttcccgtgacgcccgcctggaaagccgttttaggcgtcatggcctggccggatatcgccagtcttcctttcacccccgatctggctattttatgcactaacgccagccgtaacctggcgttactggacgcgcttggcgcgaaagggtgtaaaacgtgcattatcctttctgctcccacgtcgcaacatgaagaacttcttgcctgtgcccggcattataaaatgcgtctgctgggtccaaacagtcttgggctcctcgcgccgtggcaagggctgaatgccagcttttctcccgtcccgattaaacagggcaagctcgcttttatttcccagtctgccgccgtgtccaatactattcttgactgggcgcaacagcgtgaaatgggcttttcctactttatcgcgctgggcgatagcctggatattgatgtcgatgaactactggactatctggcgcgcgacagcaagaccagcgcgattttgctctatctggaacagttaagcgacgcccgccgttttgtttccgccgcccgtagcgcttcacgtaacaaaccgattctggtgattaaaagcggccgaagcccggcagcccagcgtttacttaataccagcgcgggaatggaccctgcgtgggatgcggccatccagcgcgcaggcctgctgcgagtccaggatacgcacgagcttttttccgccgtcgaaacactgagccatatgcgtccgctacgcggcgacagactgatgatcatcagcaatggcgccgcgcctgccgcgctggcgttagatgagttgtggtcgcgtaacggcaagctggcgacgttgagcgaagagacctgcctgcaactacggcaggcgcttcccgcgcacatagatattgccaatccgctggatctgtgtgatgacgccagcagcgaacattacgtcaaaacgctggatatcctgctcgccagtcaggattttgacgcgcttatggttatccactctcccagcgctgccgcgccgggtacagaaagcgcccatgctctgatcgagacgattaagcgccaccccagaggcaagtttgttacgctgctgacaaactggtgcggcgagttctcgtctcaggaggcaagacggctattcagcgaagccggattaccaacctaccgtacgccggaaggcacgattaccgcgtttatgcatatggtggaataccggcgtaaccagaagcaactgcgggaaacgccagcgttgccgagtaacctgacgtccaataccgctgaggcgcataatctgttacagcgggcgattgcggaaggcgccgcctcactggatacccatgaagtacagccgattttacacgcctatgggctgcacacgctcccaacctggattgccagcgacagcgctgaagcggtgcatattgccgaacagataggctatccggtagctctcaagctgcgctcgcccgacattccgcataaatctgaagttcagggggtcatgctttacctgcggaccgcaagcgaggtacaacaggccgcgaacgctatttttgatcgtgtaaagatggcctggccgcaagcgcggattcacggtttgctggtacaaagcatggctaaccgcgccggcgcgcaggagcttcgtgtggtggtcgagcacgatccggtgtttggtcctttgattatgttgggtgaaggcggcgtagagtggcgtccggaagagcaggctgtcgtcgcgctgccgccgctcaacatgaacctggcgcgctatctggtgattcagggcattaaacagcggaaaattcgcgcccgtagcgcgctgcgtccgctggatattgtcggtttaagccaattgctggtccaggtttcaaacctgattgtcgactgcccggaaattcagcgtctggatatccatccgctgctggcttccgccagtgagtttaccgcgctggatgtgacgctggatattgccccgtttgatggcgataacgaaagtcgacttgcggtacgcccctatccccaccagcttgaagagtgggtggagatgaaaaatggcgatcgctgcctgttccgtcctatcctgccggaagatgagccccaactgcgacaattcatcgcacaggtcaccaaagaggatctttactaccgttatttcagcgagatcaacgaattcacccatgaagatttagccaacatgacgcagatcgactacgatcgagaaatggcctttgtggccgtgaggcggatggacaatgctgaagagatcctcggcgtaacgcgcgcgatctccgatcctgacaacgtagatgccgaatttgccgtattggtgcgttcagatctcaaagggttgggtttaggacgccgtttaatggagaaattgattgcctatactcgcgatcacggattgaagcggctgaacggtattacgatgccaaacaatcgcggcatggtcgcgctggccagaaaactgggatttcaggtcgatattcagctcgaagagggcatcgtgggattgacgctgaatctggccaaatgtgatgaatcgtgagtaatgtactggaaatgttgaccactttaacgggtactgatgttattattgctcgcttatgtcgtctgcatagcacagaggacccttcaatgaacagagaagaaatgcactgtgatgttgtcaaaatttaagcgtaataaacatcaacaacaccttgcccaactccctaagatttctcagtcagttgatgatgtagatttcttttatactcctgctacttttcgggagacactgctggagaaaatcgccagcgcgacgcagcgtatttgtatcgttgccctgtatctggaacaggacgatgggggtaaaggtatactcgacgcgctctatgcggctaaacggcagcgtcctgaactggacgtgagggtgctggtcgactggcatcgcgcgcaacgcgggcgcattggcgcagcggcctcgaataccaatgcagactggtattgccgactggcgcaggaaaaccccggcattgatgtcccggtttacggcgtaccgattaatacgcgagaagcgcttggcgtactgcattttaaaggctttatcattgatgatagcgtcctgtacagcggcgccagcctgaacgatgtctatctccatcagcatgacaaatatcgctacgatcgctaccagctgattcgcaatcggcaaatggcagacatcatgtttgactgggtgacgcaaaatctgatgaatggccgtggtgtgaatcgtctggataatacccagcggccgaaaagcccggagattaaaaacgatatccgcttataccgtcaggagctgcgtgatgcgtcatatcattttcagggtgacgctaatgacgagcagctctccgttacgccgctggtcgggcttggaaagtccagtctgttgaacaaaaccattttccatctcatgccctgtgcggagcataagctcaccatttgtaccccttacttcaatctaccagcggtactggtgcggaatattattcagctactgcgcgacggaaagaaagtcgaaatcattgttggcgataaaaccgcgaatgatttttacattccggaagatgaaccgttcaagatcattggcgcgctgccctatctctatgagattaacctgcgccgcttcctgagccgtttacagtattacgtcaataccgatcagcttgtggtgcgtctgtggaaagatgacgacaatacctatcatctgaaagggatgtgggtagatgataaatggatgctactcaccggcaacaacctgaatccccgcgcctggcgtctggatctggaaaacgccattttgatccacgatcctaagcaggagcttgcccctcagcgggaaaaagagctggaacttatccgaacgcacacaaccatcgtaaaacattatcgtgacctgcagagcattgccgactatccgataaaagtgcgtaaattgattcgccgtctgcgccggatccgcatcgacagattaattagccgtatcctgtaatcgaagccccgtcctgtacggggttttctcttaggagtgaactggtgcgcgtgttgattccttttacggtgttgtttctctccgggtgcagccatctggctaacgaccactggagcggtcaggataaagcccagcattttatggcatcagcgatgctatcggcagccggtaatgagtatgcgcgtcaccagggagtaagccctgaccgcagcgcagcgatagggctgatgttttctttgagtctcggagcctcaaaagaactctgggacagccgcccggaaggcagcggctggagctggaaagattttgtctgggatgtcgctggcgcgacaaccggttacgctatctggcaaatggcgcgatactaaaggcgtaagccctttcctttacggtgcaacatcaacgaaaccaggaaagccagaacggccatcgcggtaacataccagaagaacgaactctccataccgacagattttagcgacagcgcgacatattccgcagagccgccaaataacgcgtttgctaccgcgtaagataaaccgacgcccagggcgcgaacctgcgccggaaacatctccgctttcaggatcccgctaatcgaggtatagaaactcacaatcaatagcgcgcatatcactaaagcaaatgcggcataaggcgacgtcacattctgcaacgcggagagaattggaacggtgaaaagcgtcgcgagtgcgccaaaacatagcatagaggtgcgcctgccaatcttatcggataacgcgccgaataacggctgcaccaacatgaaaacacacagcgcagccgtcataatgccgctggcgacattggcatgcatacctgctgtatttaccagatatttctgcatataggtggtgaaggtataaaagcacagcgagcctgccgcggtgaaaccaagcaccatcaaaaaggctttgcgattacgccacaaacctttcaacgaaccggcttcttttaatgcgcgagtctcatgcttcgaggtttcatccagctggcgacgtagccataacgccacaaccgccagcacggcgcccagcgcaaagggaatacgccatccccaggcacgaagctcagcatcgtccagaacctgctgcaaaatcacaacgaccagcaatgccagtagttggccaccgataagcgtaacgtactgaaacgacgcgaaaaatcccttacgaccttcaagcgcaacttcactcatatatgtcgcgctggtcccatactctccccctaccgagagcccctgaaataaccttgcaataagtagcagcgccggtgcccaggtgccgatggtatcgtaaccaggtaagcaggcaatcaccagcgaccccatgcacatcatgcacaccgaaatcaacattgaggctttgcgcccgcgtcgatctgcaatgcgtccaaatagccaaccaccgataggccgcattaaaaaaccggcggcaaagacgcctgccgtttgcaaaagctgagtagtggtattaccagaaggaaagaagatatgtgcaaaatagagcgagcagaaagagtagacgtagaaatcaaaccattccactaagtttccggaagaggcccccacgatagcccatatgcgtcgccgcatctccggagcctcagcgttgtttttatctatacgctgaataatttctgccatactgttctccttgttgccaggcttaatcggccttttattttggagattcagattacgcgagacccaaaagtaaataaagtgttaattatttgtttgctaatttttatccccaccgtgcctgatgctggcgtttccgtttcagatagtcttcgtcctgacggattttatcccaccaacctttgaaaaccgttgccgccgcggccttaataggatcattaccccgtgtattcaggctgccgtcttctgcatactttttaccgcctttatagttagcgtatcgcctggcgcgggtgtatcccatctgaataaatttacgcgccatgtccataccaacgaaatcatcctgctgccggtaagcttcgaacaactggtagatctgttctgcggatttcatcgccgatgcttcatctttatagcgccagaaaggaagaatttcgcttttgtagggttcaaccagtagcaccccctgctcgcctcgtccaacctgatacaattcaggctgctggcggaagtcgatgctggaaaagtcctgctggtagttaaaaggtttgatagccaatgaaaatcctcactgcttatataagcacgtgtaaaggatagttcatcgttaatgattgggtgggttgtgctcttatcagttctacaagagcaccaacttcgtaggcgggataattcctgtaggccggataaggcggagccgccatccggcagaaacagacaaaaacaaaaggccctgtcttccgacagggcccttcgttttatttgatgcctggcagttccctactctcgcatggggagaccccacactaccatcggcgctacggcgtttcacttctgagttcggcatggggtcaggtgggaccaccgcgctagtgccgccaggcaaattctgttgccagaaacgaatcttttacaccgatgctgcgttggctgcattcgtaaagtcagtcacatacttctgtatgctccttcctttccttcatttgccgccttgcctcagcgtaaaatctttcgttcccgaaaatccggaatcactgctgaaaatcgtcttctcatccgccaaaacatcttcggcgttgtaaggttaagcctcacggttcattagtaccggttagctcaacgcatcgctgcgcttacacacccggcctatcaacgtcgtcgtcttcaacgttccttcaggagacctaaagtctcagggagaactcatctcggggcaagtttcgtgcttagatgctttcagcacttatctcttccgcatttagctaccgggcagtgccattggcatgacaacccgaacaccagtgatgcgtccactccggtcctctcgtactaggagcagcccccctcagttctccagcgcccacggcagatagggaccgaactgtctcacgacgttctaaacccagctcgcgtaccactttaaatggcgaacagccatacccttgggacctacttcagccccaggatgtgatgagccgacatcgaggtgccaaacaccgccgtcgatatgaactcttgggcggtatcagcctgttatccccggagtaccttttatccgttgagcgatggcccttccattcagaaccaccggatcactatgacctgctttcgcacctgctcgcgccgtcacgctcgcagtcaagctggcttatgccattgcactaacctcctgatgtccgaccaggattagccaaccttcgtgctcctccgttactctttaggaggagaccgccccagtcaaactacccaccagacactgtccgcaacccggattacgggtccacgttagaacatcaaacattaaagggtggtatttcaaggtcggctccatgcagactggcgtccacacttcaaagcctcccacctatcctacacatcaaggctcaatgttcagtgtcaagctatagtaaaggttcacggggtctttccgtcttgccgcgggtacactgcatcttcacagcgagttcaatttcactgagtctcgggtggagacagcctggccatcattacgccattcgtgcaggtcggaacttacccgacaaggaatttcgctaccttaggaccgttatagttacggccgccgtttaccggggcttcgatcaggagcttcgcttgcgctgaccccatcaattaaccttccggcaccgggcaggcgtcacaccgtatacgtccactttcgtgtttgcacagtgctgtgtttttaataaacagttgcagccagctggtatcttcgactgacttcagctccgtgagtaaatcacttcacctacgtgtcagcgtgccttctcccgaagttacggcaccattttgcctagttccttcacccgagttctctcaagcgccttggtattctctacctgaccacctgtgtcggtttggggtacgatttgatgttacctgatgcttagaggcttttcctggaagcagggcatttgttgcttcagcaccgtagtgcctcgtcatcacgcctcagtgttaaagtgaaccggatttacctggaacacacacctacacgcttaaaccgggacaaccgtcgcccggccaacatagccttctccgtccccccttcgcagtaacaccaagtacgggaatattaacccgtttcccatcgactacgcctttcggcctcgccttaggggtcgactcaccctgccccgattaacgttggacaggaacccttggtcttccggcgagcgggcttttcacccgctttatcgttacttatgtcagcattcgcacttctgatacctccagcaaccctcacaggtcaccttcgcaggcttacagaacgctcccctacccaacaacgcatcagcgtcgctgccgcagcttcggtgcatggtttagccccgttacatcttccgcgcaggccgactcgaccagtgagctattacgctttctttaaatgatggctgcttctaagccaacatcctggctgtctgggccttcccacatcgtttcccacttaaccatgactttgggaccttagctggcggtctgggttgtttccctcttcacgacggacgttagcacccgccgtgtgtctcccgtgataacattctccggtattcgcagtttgcatcgggttggtaagccgggatggccccctagccgaaacagtgctctacccccggagatgaattcacgaggcgctacctaaatagctttcggggagaaccagctatctcccggtttgattggcctttcacccccagccacaggtcatccgctaatttttcaacattagtcggttcggtcctccagttagtgttacccaaccttcaacctgcccatggctagatcaccgggtttcgggtctataccctgcaacttaacgcccaattaagactcggtttccctccggctcccctattcggttaaccttgctacagaatataagtcgctgacccattatacaaaaggtacgcagtcaccccaccccaaagcattcaccgcttgttttgtgtgttgggcgtcgcaaacgacgctccgccaccgcgatgctgctttgcagggccttcaacaccagagaatgctttggtggtggggctcccactgcttgtacgtacacggtttcaggttctttttcactcccctcgccggggttcttttcgcctttccctcacggtactggttcactatcggtcagtcaggagtatttagccttggaggatggtccccccatattcagacaggataccacgtgtcccgccctactcatcgagctcacagcacatgcgcttttgtgtacggggctgtcaccctgtatcgcgcgcctttccagacgcttccactaacacacatgctgattcaggctctgggctcctccccgttcgctcgccgctactgggggaatctcggttgatttcttttcctcggggtacttagatgtttcagttcccccggttcgcctcattaacctatggattcagttaatgatagtgtgacgagtcacactgggtttccccattcgggtatcgccggttataacggttcatatcaccttaccggcgcttatcgcagattagcacgcccttcatcgcctctgactgccagggcatccaccgtgtacgcttagtcgcttaacctcacaacccgaagatgtttcttacgattcatcatcgtgctgcgaaaatttgagagactcacgaacaactttcgttgttctgtgtttcaattttcagcttgatccagatttttaaagagcaaatatctcaaacgtgactcgtaagtcagttttgagatattagggcaggtgactttcactcacaaaccagcaagtggcgtcccctaggggattcgaacccctgttaccgccgtgaaagggcggtgtcctgggcctctagacgaaggggacgtatcagtctgcttcgcaagacgccttgctatttacttttcatcagacaatctgtgtgagcactgcaaagtacgcttctttaaggtaaggaggtgatccaaccgcaggttcccctacggttaccttgttacgacttcaccccagtcatgaatcacaaagtggtaagcgccctcccgaaggttaagctacctacttcttttgcaacccactcccatggtgtgacgggcggtgtgtacaaggcccgggaacgtattcaccgtggcattctgatccacgattactagcgattccgacttcatggagtcgagttgcagactccaatccggactacgacgcactttatgaggtccgcttgctctcgcgaggtcgcttctctttgtatgcgccattgtagcacgtgtgtagccctggtcgtaagggccatgatgacttgacgtcatccccaccttcctccagtttatcactggcagtctcctttgagttcccgacctaatcgctggcaacaaaggataagggttgcgctcgttgcgggacttaacccaacatttcacaacacgagctgacgacagccatgcagcacctgtctcacagttcccgaaggcaccaatccatctctggaaagttctgtggatgtcaagaccaggtaaggttcttcgcgttgcatcgaattaaaccacatgctccaccgcttgtgcgggcccccgtcaattcatttgagttttaaccttgcggccgtactccccaggcggtctacttaacgcgttagctccggaagccacgcctcaagggcacaacctccaagtagacatcgtttacggcgtggactaccagggtatctaatcctgtttgctccccacgctttcgcacctgagcgtcagtctttgtccagggggccgccttcgccaccggtattcctccagatctctacgcatttcaccgctacacctggaattctacccccctctacaagactcaagcctgccagtttcgaatgcagttcccaggttgagcccggggatttcacatccgacttgacagaccgcctgcgtgcgctttacgcccagtaattccgattaacgcttgcaccctccgtattaccgcggctgctggcacggagttagccggtgcttcttctgcgggtaacgtcaattgctgcggttattaaccgcaacaccttcctccccgctgaaagtactttacaacccgaaggccttcttcatacacgcggcatggctgcatcaggcttgcgcccattgtgcaatattccccactgctgcctcccgtaggagtctggaccgtgtctcagttccagtgtggctggtcatcctctcagaccagctagggatcgtcgccttggtgagccgttacctcaccaacaagctaatcccatctgggcacatctgatggcaagaggcccgaaggtccccctctttggtcttgcgacgttatgcggtattagccaccgtttccagtagttatccccctccatcaggcagtttcccagacattactcacccgtccgccactcgtcagcaaagcagcaagctgcttcctgttaccgttcgacttgcatgtgttaggcctgccgccagcgttcaatctgagccatgatcaaactcttcaatttaaaagtttgatgctcaaagaattaaacttcgtaatgaattacgtgttcactcttgagatttggtattcatttttcgtccgaggacgttaagaatccgtatcttcgagtgcccacacagattgtctgataaattgttaaagagcaggtgcgacgcggcttgcagctcaccgtcgcgaggtggcgtatattacgctttcctctttttgagtcaagcctttattttcgctttcctcacagacttcttaacgaagcttttctgacccggcggcctgtatgccgttgttccgtgtcagtggtggcgcattatagggagttattagagcctgacaagacctaaatgcaaaaaaaagctcaaccgttcacttttcaaacaacatttgaaccaaaagcctattttcgcctggtttttaaacaaaaacgagcccgtcagggcccgttttattcaaatttgtgacttactgcactgccacaatacgatcatcattggcttcaaggcgaatcactttgccaggaaccagttcaccagacaggatttgctgcgccagtgggttttcgatctgctgttgaatagcacgttttaacggacgcgccccgtagaccggatcgtaaccgttggcgctcaacagtttcagcgcctcgtcggagatatggatttcataaccacgttcttccagacgtttgtacagacgctgcagctggatctgagcaatagaagcgatgtgttgttcacctaacggatggaataccacaacttcatcaatacggttgataaattccggacggaagttttggctaaccacacccagcaccatctctttcattcgaccgtaatccagttcgccaaagcgctcctgaatgagatcggaaccgaggttagaagtcataatgaccaccgtattacggaagtcgaccgttctcccctgcccgtcagtcagtcgaccgtcgtccagcacctgcaacagaatgttgaatacatccggatgcgctttttccacttcatccaacaagatgacggaataagggcgacggcgcaccgcttccgtcaaataaccgccttcttcatagccgacatatcccggaggcgccccgaccaaacgagacacggagtgtttctccataaactcagacatgtcgatacgcaccatcgcgtcgtcgctgtcgaacataaagttagccagtgctttacacagttcggttttaccgacccccgtcggccccaggaacaggaaggaaccaatcggacggttcggatcggacagcccagcacggctacgacgtatggcgttcgatactgcttcaacggcttcattctgcccgatcacacggctgtgtaactcttgttccatacgcaacagtttttcacgttcgccttccagcattctggaaaccggaataccggtccagcgcgctagcacttcggcaatttccgcatccgttactttgttacgtaacagacgcatggttttaccttccgactgggtcgcggcttccagctgtttttccagctccggaattttgccgtactgcagttcagacattcgcgccaggtcgccaacgcgacgcgcctgctcgatggcaatcttcgcctgctccagctccgctttaatagtttgcgtaccagagagcgacgctttttccgctttccactcttcttccagctcagaatactggcgctctttgtcgtccagttcttcgttgagcatatcgagacgttttttactcgcctcgtcagactctttcatcaacgcctgctgttccagtttgagctgaataatgcggcggtcgagtctgtccagctcctccggcttagagtcaatctgcatacgaatgctggatgcagcttcatcgatgaggtcgatagctttatccggcaactgacggtcggcgatatagcggtgagataatgttgccgccgccacaatcgccgggtcagtgatctgcacatggtggtgcagctcgtaacgttctttcaggccacgcagaatagcgatggtgtcttccactgaaggttctgcgacaaacactttttgaaaacgacgttccagcgccgcgtctttttcaatgtactgacggtattcatccagcgtggtggcgcccacacagtgcagttcaccacgcgccagcgccggtttcagcatattcccggcgtccattgcgccatcagccttacctgcgccaaccatcgtgtgcagctcgtcaataaacaggatgacgttgccttcctgtttcgccagatcgttcagcacgcctttcagacgctcttcaaattcgccgcgatatttcgcccccgccaccagcgcgcccatatccagcgccagtacgcggcgaccttttaagccttcagggacttcaccgttaataatgcgctgcgccagtccttcaacaattgccgttttaccgacccctggctcaccgattaacaccgggttgtttttggtacgacgttgcagtacctgaatggtacggcgaatttcttcatcacgaccaattaccgggtcaagcttgccttgttcagcccgctcggtcagatcgacggtatattttttcaaggcctgacgttggtcttcagccccttgatcgttcacgctttcacctccgcgcatctgttcaattgcctgagtgatattggccgtggtcgcaccggctgatttcagcagatcggttaacgtgccgcgagactcaagcgccgccagaacaaacagctctgacgaaataaaattgtctccccgtttttgcgccagcttgtcgcaaaggttcagtacgcgtaccagttccgaagaaggctgtacgtcgccgccggtgccttccacctgcggtaaacggctcagcgcctgatcgatagcggtgcgcaactggccagcattaatgccggcggaggttaataaaggacgtatcgatcccccttcctggttcagcaaggcgctcattaaatgaagaggttcgatgaattggttgtcgtgccccagcgcgagcgactgggcatcggcaagagcaagctggaatttgttagtaagacgatccagacgcataactcctcccataacaggtcaaaattgctactggagattaaatgaggtcatccctcaattattcaaggtgaatgacctgaattatgtgaaaagaaagttacccgtaccggatcgtcttgattctttaggttatatcagccaaataaaacttgccatacgacctgtcgtcttgtcgcgacgataagagaagaaagtctcactttcgctaaaggtgcagcgatccccgccatagacatgttcaacgccggtattcgccagacgttggcgtgcaagctgataaatatccgccagaaatttttccccgtgcggcaaaaatgcgctatcggcttgcgcatcttttgctaaaaatgcgtcacgcacttccggccccacttcaaacgcggtcgggccgatcgccggacctaaccaggcgatgatattttctggtttgtcagcaaagcaggtgacagtttcctccagtacgccttcacataatccgcgccagcccgcatgagccgccgccacttctgttccctcacggttacagaatagcacaggcaggcagtctgccgtcattaccgcgcagacggttcctggcgtattgctgtaagacgcatccgcacgtttggaggcataaggttctccggtaagcctcaacacatttttaccgtgaacctgttcaagccagacaggtttcgaaggcagattgcccgccgcaaacagacgcttgcggttctcttcaacatgctccgggttatcgccgcaatgcgcgcccagattcagcgagtcgtaaggcggtaaactcaccccgccaatacgggtagaactacaggctgcgacgcctttcggcagcggccactgcgggacaatcagtgcattcataaccagtccacatcatctttatgatcttcaaaatcggcgcgcatcgcatcgataaggtccaccatatcttgtggaatcggcgcgtgccactccatttcgatacccgatacaggatggtagagacgcagcatcgttgcatgaagcgcctggcggtcaaacttacgcagagtggaaataaactcttccgatgcgcctttcggtggacgtggacgaccaccgtagacctgatcgcccactaacgggtgcgtaatatgcgccatatgcacgcggatctggtgcgtacgcccggtctccagacgcagcctaagacgcgtgtgcacacggaaatgttccataatgcggtagtgggtcaccgccggtttgcccatgggatgcactgacatatgggtacgtttggtcgggtgacgactgatgggttcattcaccgttcctcccgccgtcatatgtccgatcgcgaccgcttcatattcgcgggtgatctcgcgcagctgcaaagactccaccaggcgcgtttgcgccggaacggttttggccaccaccatcagccccgtcgtgtccttatccagacgatgtacaatgcccgcgcgcgggacatccgcaatcggcggataataatgtagcaacgcgttcagtaccgtaccgtccgggttacccgcgccaggatgtaccaccagatcgcgtggtttgttgataaccagaatatcgtcatcttcataaacaatatctaacgggatatcctgcgcttcaaaacgaatctcttcgtcgatctccgcatcaatagccacccgctcgccacctaacactttttcttttggcttatcgcaaagttgaccattgaccaacacgcgctgattcaaaatccattcttttatacgcgaacgtgaataatccgggaacatttcggccaaagcctgatctaagcgttgaccgagttggttttcggagaccgttgcggtgagttgtactcgttgtgccatatacagcttcttcgtttaacgttgggttttacggctttgccgtttaatatagtgtgctattgtagctggtcttaaccgggagcaggaacagagaatctcccgtaaaacattttgaggaaagtcaaaacgtcatgacgcgcatgaaatatctggtggcagcagccacgttgagcctgtttctggcgggttgctcgggttcaaaggaagaggtgcccgataatccgccgaatgaaatctacgcgactgctcagcaaaagctgcaggacggtaactggaaacaggcaataacgcaattggaagcgttagataatcgttatccattcggaccgtattctcagcaggtgcagttggatcttatctacgcctattacaaaaacgccgatttgccgctagcgcaggccgccatcgatcgttttatgcgtcttaatccaacgcaccctaatattgactatgtcatgtacatgcgcggcctgacgaacatggcgctggatgatagcgcgctgcaaggtttctttggcgtcgatcgcagcgatcgcgatccgcaacatgcgcgggcggcgttcaatgacttttcgaaactggtacgcagctatcctaatagccagtacaccaccgatgccactaagcgtctggtattcctgaaagaccgtctggcgaaatatgaatattccgtcgcagagtactataccgcgcgcggcgcatgggttgcggtcgtaaaccgggtagaaggtatgctacgcaattatcctgatacgcaggccacgcgcgatgcgttgccgctgatggaaaacgcctatcgtcagatgcagctgaatgcgcaggctgacaaagtcgcgaaaattattgccgctaacagcaaaaacacctgaagcaatacaaacaagcaaaacggcagccttccggctgccgtttttttattcggtatctgatgcaacagaaatgatttcactgcaacgcatccagtcaaatatggcctgctttcagccattcctcaagtaaaagatcgcttcttcctgcgatgcctcacaaaaagttcgccttgacaaaaagtgacaaaataatgtgatttacatcacacattttgacattaagaacggtatgctggaatcaccaagacgggaaagacaagaggtaaaatttatgacaatgaacattaccagtaaacaaatggaaattactccggcaatccgccaacatgtcgcagaccgtctcgccaaactggaaaaatggcaaactcacctgattaatcctcatatcattctgtctaaagagccacagggctttattgctgacgccaccattaatacaccgaacggacatctggtcgccagcgcaaaacacgaagatatgtacaccgctattaatgaattgatcaacaagctggaacggcagctcaataaagtgcagcacaaaggcgaagcccgtcgtgccaccgcatcggtgaaagatgccagcttcgtcgaagcagaagaagagtagtcccttacattgagtgtatcgccaacgcgccttcgggcgcgttttttgttgacaggattaaaacagtacgggtactgtacttacgtacacaaaggaaacagttatgaagctcacccggtttttcttcgcattcttttttatcttcccctgaccgggaggcgtttcgtcatgtgataaagaatgcgaagacgaacaagaaggcctcccccaccgggaggccttttttattgataacaaaaaaggcaacactatgacatcggaaaacccattactggcgctgcgagataaaatcagcgctttagacgaagagttactggccttactggcaaaacgacgcgcgctggcgattgaagtgggacaagcaaaactactgtcgcatcgtccggttcgggatatcgatcgtgaacgcgcgctgctggacaggctcatccatctcggtaaagcccaccatctcgacgcacactacattacccgtctgttccagcttatcattgaagactccgtgcttactcagcaggcgctgctgcaacaacatctgaataatactcaccctcattcggcacgtattgcgtttcttgggccgaaaggctcctattctcatctcgcggcgcgccagtatgctgcacgccattttgagcaatttattgagagcggttgcgcaaaattcaccgatatttttcatcaggtcgaaaccggccaggccgattacgccgtggttccgatagagaacaccagctccggcgctatcaatgatgtgtacgacttattgcaacacaccagtctgtcgattgtcggtgagatgactgtcactatcgatcactgcgtgctggtttccggcgctacagatctgaataccatcgaaacggtgtacagccatccgcagccgtttcagcagtgcagtaaatttttgagccgctatccgcactggaaaatcgactataccgagagtacgtcggcagcgatggaaaaagtcgcgcaggcaaactctccgcgcgtcgcggcgctcggcagcgaggcaggcggcatgttgcacggattacaggtgctggaacgcatcgccgcaaaccagacgcagaatatcacccgctttctggtactggcgcgcaaagccattaatgtttccgatcaggttccggcaaaaaccactctgttaatcgccaccgggcagcaagctggcgcgctggtcgaagcgctgctggtgctgcgtaaccacaatctcatcatgacgaaactggagtcgcgccccattcacggcaatccgtgggaagagatgttttatctcgatattcaggcgaacctggagtcgcaggtaatgcaaagcgcgctaaaagagctgggcgagatcacgcgctcaatgaaagtgcttggctgctatcccagcgaaaacgtcgtgccggtagaacctgcctgacgttcaataaaacggcttttcttcatccctgcgacggctacctgcagggtgaagatggcgccggagagcggataatccgccacttcctgagcagacatattttctctggtagttgtaataaacagcgttttcatatctgcgccgccaaagcaaaccatcgtcggacaacgtaccggcaaccggtactcttccagctgctcttcttgcggtgagaaacgcgccacgcgccagccgtcaaacatcgcgctccagtagcacccttcgctatccatcgccgcgccgtcgggaagtccttctccttcgccaaaatggcgaaaaagttcacgcttgcccggatcgccatgcttatcaagtaacgtgcggtatatcacgccattcggcgtatcggaggtatacatccactggttatccgggctgaacgccaggccgttgtgtccctggatatcgcactggatcacttttgccgtcaggtcatgatcgatccgcatcagcaacgcgccattatagtcacctggcgcccagaacgttccggcataaaaacgtccatcgccatcagtgccgccatcgttaaaacgcgccagtttcgtattagagggattgtcgcaaaccttacgctgcaataatccatttttatcggccagccagatagcatgacgcatggccacaataaatccgccctgctcacgcaaggcaaaacagcccacctcttccggaaacaccagcacgctatgcgtcccactcgccggatggtaacgatggatctcctgttccaggatatcggtccaatacagcgcgctttcatcctcgctccatgtggggcattctggtagatgtccgacataatcaaataaaacgtgcggcgtagtcataacggttccttaaacgaaaaaagccagcaaagctggcttttagtatagatgtcatcattatggtcggctgtcattcgcctgacgcaataacacacggctttcattctggaagcgtctggcataatcgccaaaccagtgttcaactttgcgaaaactgtcgataaaagcctgcttatcaccctgttccagtaacccgatcgcatcgccaaaacgtttatagtaacgcttgataagcgccagattgcgctccgacgacataataatgtccgcatacagttgcgggtcctgggcgaacagacgcccgaccatcgccagctccagtcgataaatcggcgatgatagcgccagaagctgctcaagctggacgttctcttccgccagatgcagcccataagcgaaggtagcaaagtggcgcaacgcctggataaaagccatgttctgatcgtgctcgacagcgctaattcgatgcaaccgcgcgccccacacctggatttgctcaaggaaccactgatacgcttccggttgacgcccgtcacaccagaccaccacctgcttcgccaggctcccgctgtccggaccaaacatcggatgcaagcccaacacggggccatcatgggccgccaacattgcctgcaacggaccgcttttcaccgatgccagatcgaccagaatacagtcggacggcaggggcggcagttgcgctatgacctgttcagtaacatgaatcggcacgctgacgatcaccattccggcatcggcgacaatgtccctggcgcgcggccagtcctgctgttccagaatacggacctgatagcccgacagcgtgagcattttttcaaacagacgccccatctgtccgccgccgcccacaatgacgaccggacgcagagaaggacaaagcgttttgaaccccttatcattttcgctggagtaagattcacgcattacccggcgcaggacatcttcaatgagatcgggcgggacaccgatcgcttctgcttccgcccgtcgtgaagccagcatagaggcctcacgctccggcacgtaaataggcaggccaaaacggcttttcacctcgccgactttggcaaccagttccaggcgcttagccagtaaattcaacaacgctttatcgacatcatctatttgatcgcgtaatgcggtcaattcagcaaccataacaacctcttatgcgacgcgcaccgccagctggccgctcaaatctttatgaatttcacgtaacagggcatcggtcatctcccagctaatacaagcatcggtgacggaaacgccatacttcatttcgctgcgcggctgttcggaagactggttaccctcatgaatattactttcaatcattaagccaatgattgaacgattgccatctttaatctgcgcaaccacagattcggcaacggctggctggcggcgataatctttattggagttaccatgactgcaatctaccatcagcgaaggacgtagtcccgcctgttccatctctttttcacactgagcgacatctgccgggctatagtttggcgctttgccgccacgcagaatcacatggccatgcggatttccctgggtttgcaataacgcaacctgaccggcctggttaatgccaacaaaacgatgaggttgcgcagcggcgcgcatggcgttaatcgctgtcgccaggctgccatccgtgccgtttttaaagccgaccggcatagaaagaccagacgccatttcgcggtgggtttgcgattcggttgtgcgcgcccctatcgccgaccagctaaacagatcgcccaggtattgcgggctgttcggatccaacgcttcggtcgccaatggcaaccccatattcaccagttccaccagtagctgacgcgctattttcaacccggcttccacatcaaatgagccatccatgtgaggatcgttaatcagccctttccagccgacggtagttcgcggcttttcaaaatagacgcgcattaccagatagaggctatcgctgacctctgcggcaagggctttaaatcgacgggcatattccagagcggtttcaggatcgtgaatagaacaaggaccgcataccaccaacagacgcggatcgcgcccggcaataatgtcagaaatgattccccgggactgcgctatctgcgcttcctgcgccaggctcaagggaaaggccgctttaagctgctccggcgtcattaatacctgttcatcggtgatacgtacgttattcagcgcgtctttttgcatgatggcgatcctgtcttttcttgtttgcgatagttgatcctccacgaggatgtttaaaccataccacaaaaagtaaagatttcaatccatattacgtaaaataaactttacaccatgcgcaatcgtcgattaatctccctcatttcgtatcaaaaactttacacaacaagtgaattattttattcccagcctcagaaaagcggtaaaatgagcgatgctcgctattttttgattattttttctccgcacacatatttttactttctgatatagggtgattaataccattatcacaagaatttaatatcagggatatcacttaaattattcatattatcaataagacataatgacgatatggcaaaataatgttattttgctacaaacaatcacggatgtattttaatgctttacgactgaagatggtggggacttgttaatgcgtttttctcaccgatttatccttctgttatcgctattattagcaagcttgcctctgtatgctcaacgcgtcacggaagaagagaaatccgtacgcgccatcgtctccggtatcgtcagttatacacactggccggcgttatccgggccgccaaggctatgcatattttcatctgcgcgttttgtcagggtacttagcgaagaggctgactgggctttcccttatcaaccgcttgtcatccgtaccacacaagaagccctgagcgcccgctgtgatggtttttactttggcaatgaatcgccagcttatcaggtggagttaacgcgtcattatccagttaatgccttgttattaattgccgagcaaaataccgaatgtattattggcagcgcattttgtctgatcattaacaatgatgaagtcaaattttccgtcaacctggactccctctcgcatagcggcgtgagagtaaatccagaagtattaatgcttgcacggaatcaaaagcatgaataaggaattttctctgtccaggccaacatttaaacgcacactacggcggattagtataatcagcgtgctgcttacaatgacattgatctggctattaatttgcgttgcgtctgtccttacgctcaaacagtatgcgcaaaagaatctcgatttgaccgccgccacaatggcccatagccttgaagcggcactggtattttccgataacgcggccgcagcggaaacgctcgccacactgggacgccagggacaattttcagcggcggaggtccgcgataaaaatggccgtactatcgcctcatggcgctatgatgcgcgagccgcagacgataagctcattggcttaattagccactggctttttccattgccggtatcacaacccgtctggcacaacggcagggccatcggcgaagtacggcttgtcgcccgcgacagccttattggtcattttatctggctatcgctggcagtgctgacaggatgtattctgctggcatccggcattgccctgctgctcacgcgttatttacacaatggcgttgtggatgcgctgcaaaatattactgaagttgtacacgacgttcgcactaaccgaaatttttcacgccgggtacctgatgagcgtattgcggaatttcacctgtttgcgcaggatttcaatagccttctggatgagatggaagaatggcagctacggcttcaggctaaaaatgcccagttactacgtaccgcgttgcacgatccgctgacggggcttgccaatcgcgcggcatttcgcagctgtattaacgcgctgatgaaggacaattccgctcgtagcagttcggcattgttatttctggatggcgataactttaaatatattaatgatacctggggacatgcggcaggcgaccgcgtacttatagaggttgccaaaagattagcggaattcggtggtagccgttatcagacttaccgactcggcggcgatgaatttgcgatggtgctttacgatgtacattcggaatatgaagtacaacgtatttgcgcagcgctatcccaggcgtttaatcgaccttttgaactgcataacggccagcgaataacgatgaccctgagtattggctttgcgctgacatgggaacatgccactgccgaaaaactacaagaactggccgatcgaaatatgtatcaggctaaacaccggcgtgcggagcgctcgctaaactaaggaacgggcctggccgtttctgactcagcgttgagaccactgacccagcctaatcatgcaaccatctatggcgtggagcaaacccataaaaaaggggccagcgtaatgccagccccttcttttctacaagctttcggatgttgcgaaagcgcgttcttagttaagacgctctttgatacgagccgctttaccagtacgctcacgcaggtagtacagtttagctttacgaacagcaccacgacgtttaacagcaatgctgtcaactaccggagagtgagtctggaagacacgctcaacgccttcgccgttggaaattttacgaacagtgaatgcagagtgcagaccgcggttacgaatagcgataaccacgccctcgaatgcctgcagacgtttcttggtaccttcaacaacccatactttcacttccacggtatcgcccggacggaaggaaggtacgttctgcttcatctgctcttgttcaagttgcttaataatgttgctcataatttaatctcttatcctgggtaaactgatattcgggggcctatgccatcccatcatgtttatgctgctgttgtgcgtgttctgttttgaactccgccagcaaccttgcttgctcttcagtcagagccaggttttccagaagttcaggtcttctaagccaggttcggcccagcgactgtttcaaacgccagcgacgtatctcagcatggtttcccgacagcaatactggcggtacttccatcccctctaacacttcagggcgcgtatagtgcggacaatccagcaacccatcagcaaacgaatcttcgattgctgatgcctcatgccccagaacccccggtataaaccgggcgacggagtcaatcagcgtcattgccggtagttcgccaccgctgagaacgtaatcgccaattgaccattcttcgtcaatttcggtctgaattacgcgctcatctacgccttcgtagcgaccacacaccagaataagcttctgattcgtggccagctcgctaacgcccgcttgatcaagcttgcgtccctgaggcgacagataaatcactttagcgccttcacctgccgcggcttttgctgcgtgaatggcgtcccgcaagggttgcaccatcattaacatccccggtccgccgccgtaaggacggtcgtccacggtacggtgccggtcatgcgcgaagtcgcgaggactccagctttggatgttcagcaggcctttttttactgcccggccagttaccccgtaatcggtaattgcgcggaacatttcaggaaacaggctaactatgccaataaacacaagccaatccccataacgccatttattaccgtttattcggtggtttaaaaaccaggatcccagtctacttcgatagtacgagtagcgagatcgactttcttgataacctgcccatcgaggaacggtactagtcgttccttgataccaaatgcatctttcaggttcgccttaatgacgagaacgtcattcgacccggtttccatcatgtcgataactttaccgagatcgtagccttcagcggtgactacctggcagcccatcaggtctttccagtagtagtctccctcctcaagcgcaggaagttgcgaggaatccacgacaatttcgcaattggtcagaagattcgcggcatctcgatcgtcaacgcctttcagcttgatgatcagatcctgattgtggtgcttccagctttccagctgtacctgctgccactgacccgccttctggataaaccagggctgatagtcaaaaatgctttcggcgtcttcagtggaggaaaacactctgagccaaccacggataccgtatgaagaacccattttccccagtacaaccggttcagcgggtacttgtgcggcgagttgcttgctcatcatgaccaccgtgacagattaagctgctttttttacttctttgatcagcgccgcaacgcgatcggaaatggttgcgccctggccaacccagtgagcgatgcgatccagatccaggcgggtgccttcttctttttcgctagcgattgggttgaagaaaccaacgcgctcaatgaagcgaccgttgcgtgcattacggctgtcggtgacaacaacctggtagaacggacgctttttagcgccgtgacgagctaaacgaatagttaccataacatcctcttgtgtgaataaaacaaccgggccccatcgaggaacggagcccggcgtcatattaaaagcccgaaaattttactgatttctgggaaaaaagcaatcaacatgtgatgaagcttgattccagggcgtgaccgttgcagccagtttggcgtcggcgtgcgcgcagaaagcggagcgtacacgcagtacgtgagcatttactcgctccgctcgcccttcgggccgccctaaagggcgttcaaaacactatcgtgttttgtcgagcacactccggcgtcaaaatggcaaataaggtagcccgatatatttatctacccgggaagcctggcggcatcatccccttcatactccgcatcatcttcgccatcccgcccttcttcatcttcttcatcatgcgctgcatgtcgtcgaactgtttcagaaggcggttaacgtcctgcacctgcatcccacagccctgcgcgatacgacgcttgcgggaacctttgatgatttccggcttcgcgcgttctttcagcgtcatcgaattgatgatcgcctccatacgcaccagcaccttgtcatccatctgcgatttaacgttgtccggaatctgccccatgcccggtaatttgcccatcagactggccataccgcccatgtttttcatctgtttgagctgttccaggaagtcgttcaggtcgaaaccgtcgcctttcttcagtttggtcgccagcttctcagcctgtgcgcggtcaactttgctttcgatatcttcgataagagacagtacgtcgcccatgccgagaatacgcgaggcgatacgatccggatggaatggctccagcgcgtcggttttctcgccgacaccgaggaatttaatcggcttgccggtgatatgacgaatagagagcgccgcaccgccacgcgcatcaccatcaactttggtcagcaccacgccggttaacggcagcgcttcgttaaaggcttttgcggtattcgccgcatcctgaccggtcatcgcatcgacgacaaacagcgtttctactggcttgatagaagcgtggacctgtttgatttcgtccatcatcgcttcgtcaacatgcagacgaccggcggtatccaccagcagcacgtcgtagaatttgagcttcgcttctttcagcgcggcgttgacgatatcaaccggtttctggccgacatcagacgggaagaaatccacgccaacctgctcagccagcgtttcgagctgtttgatcgccgccgggcgatagacgtcggcagagacgaccagcactttcttcttgtgcttctcgcgcaagaatttacccaacttaccgacgctggtggttttacccgccccctgcagacccgccatcaatactacggctggcggctgcgcagctaaattcagcgtctggttctcttcgcccatcgccgcaaccagttcgctacggacaatcttgacgaactcctgccctggggtcaggctcttgttaacttcatgaccaaccgctttctcttttacgcgattgatgaactcacgcactaccggcagcgcaacgtcagcctccagcagcgccatgcgcacttcgcgcagcgtctctttaacgttgtcttcagtaaggcgcccacggccactgatattgcgcagcgtgcgcgacaaacgatcggttaaattatcaaacattgtctctcgcctggggtggaaacggttggtcgccgcagcgacacagttacagaatttcgccacagtataccatgaagccgtctttgttgttatgcaacggttggagctgcggtcacgtaacgctatactgcttctctttctcactggtcaactgtcgacacaactatgcccgtttttgctttacttgcccttgtcgcctactccttcagcctcgcgctgatcgttcccggactgttgcaaaaaaacagcggctggcggcgtatggctattctttctgcggtcatcgcgctggtgtgccatgctgtcgcgctggaatcgcgtattctgcccggcggcgacagtggacaaaacctgagcctgctgaatgtcggttcgctggtcagcctgatgatctgcacggtgatgaccattgtcgcgtcgcgtaatcgcggctggctacttctgcctattgtctatgcttttgcgctgattaacctggccttcgccacgttcatgcctaatgaatatattacgcatctggaagcgaccccaggcatgatggtgcacatcggtctgtcgcttttctcttacgcgacgctgataatcgccgctctgtatgcgctacagctggcgtggatcgactatcagttgaagaacaaaaagctggcgtttagtaatgaaatgccgccattgatgagcattgagcgcaaaatgtttcatatcacgcagattggcgtcgtactgctgacccttactctgtgtaccggcctgttttacatgcataacctgttcagtactgaaaatattgataaagccgtgctctctatcgtggcatggtttgtctatatcgttctgctgtgggggcattaccatgaaggctggcggggtcggcgggtcgtgtggtttaacgtcgcaggcgcgggtattctgacgctggcctattttggtagccgcatattacagcaatttgtaagctaagcttttaaaggagtttcccctggaacacatctccaccaccacgctgattatcatattaatcatcatggtggtcatctcggcctatttttccggttccgaaactggaatgatgacgctaaaccgttaccgtttacgccatatggcgaagcaaggtaatcgctcggcaaaacgggtagaaaaattattgcgtaaacccgatcgactgataagcctggtgctgatcggcaataacctggtcaacattcttgcctcggcgctcggcacgattgtgggtatgcggctttacggcgacgccggcgtggctatcgccaccggggtactgacgtttgtcgtgttagtttttgctgaagtcctgcccaaaactatcgccgcgctctatccggaaaaagtggcctatcccagcagcttcctgctggcgccgttacagatactgatgatgccgctggtgtggttacttaacaccatcacccgcctgctgatgcgtctgatgggaattaaaacggacatcgtggtcagcgggtcgttaagcaaagaggaattacgcactatcgtgcatgaatcccgttcgcaaatctctcgccgcaatcaggatatgctgctgtcggttctcgatctggaaaaggtcagcgtggatgacatcatggtgccgcgtaatgaaattatcgggatcgatatcaatgacgactggaagtctatcgagcggcagctcacccactcgccgcacggacgcattgtgctctatcgcgattcgctggatgacgccatcagtatgctgcgcgtgcgtgaagcctggcggttaatggccgagaaaaaagagttcaccaaagagatgatgctgcgcgccgccgatgaaatctattacgtcccggaaggtacgccgctcagtacgcaactgattaaatttcagcgcaataaaaagaaagtcggactggtcgtcaacgaatatggcgatatccaggggctggtcaccgtggaagatattctcgaggagatcgttggcgacttcaccacatcgatgtcgccgacactggcggaagaggtcacgccgcaaaacgacggttcggtcattattgacggtaccgccaacgtccgggaaatcaataaagcgtttaactggcacctgccggaagatgacgcgcgcaccgtcaacggggtgattctggaggcgctggaggaaattccggttgctggcacgcgcgtgcgcattgagcagtacgatatagatattctcgatgtacaggaaaatatgattaagcaggtaaaggttgtaccggtaaaaccgctgcgcgagagtgtggcggagtaacacaatggcgaactccggttcgccttttttatcgccgtcttttaagattccatcaattcctgccatttacttaacaatgcaataatgtcttttcaggcattcagaaaggatattgatgttatgtcagaagattatgtaattgaatgggataagaattttgcagacgacctcaacgtcgtcgccaacgtttttttatcacacaacccaaccttatggcccactattttctctcaactttcgacgcaacctgaaatctttgaagacgaagatgaagacgaatatgggttgcaggacgtcctggattgtagcggtggcgatctcggaaataacgagctggcacaggcatttttacaagttctacgcggcgaaggatttattcacctcgttgactggaaaggtgaagatgaagaaggcgaactggctaattttgccgcagatcgcttttatgaactcacaaaaaacctgacggattctgaggaattaagaaatcttcttgtcgaaataacccaagaggatgaaatctccgatgtctgtgaagccggggaccgttaccttgacgagatctttgaacgcatccagaccgaactcaataagaggggcttccagatttttgatctgaatgaaggatctgacacctataatgtggtcgttctgccaatgagcgaatataaaaaaatagaggacttcaacacgccgtggctggaagtgcaggattttttaagctaaaaaaatggccgactttacatcggccatcaaacttttacttcgccttcgctacagtcaccatcgccgcgcgaatggtacgaccgttcagcgtatagcctttctgcataatacccagcacattgcctgccggaacctcttccgactccaccatcgcaatcgcctgatgcacgttcgggtccagcggcacgttggtctcagcaatcacttccacgccgaatttacgcaccacatccagcatagacttcagcgtcagctcaatcccttcgaccattgccgccatatccggattggctttgtctgcgacttccagcgcgcgatccaggctatcgatgaccggcagcaattcgttgacgaacttctcgagagcgaatttatgcgctttttcgatatcctgttcagtacgacggcgcaggttttccatttccgctttgatgcgcaacacggtgtcgcgttcgcgagtctgggcttctgcaagctgaacttccagattcgcaattttttcatcgcgcggatccacctgctcagcagaatcgtttggttcaactgcctcaacctcttcgtgctgatccatgataatttcttccggggcttgcccctcaggcgttttctgttctttactactcatgaatttctccgcgtttttttcgcattcatctcgctaacttcgcttattatggggatcagattcagggtttcaagggaagtactcacattgtcatcaatcttcgctacaaggacctcagaaaaatgaataatcatttcaagtgtatcggcattgtggggcatccgcgtcatcccaccgcactcacgacacatgaaatgctctaccgttggctatgcgatcagggttatgaggtcattgtggagcaacaaatcgcccacgaattacagctaaaaaatgtgccaaccggcacgctggcggaaattggtcaacaggcggatctggcggtagttgtgggcggcgacggcaatatgcttggcgcagcgcgtacgctggcgcgttatgacatcaatgtgattggcattaaccgcggtaatcttggcttcctgaccgatctcgatccggacaacgccctgcaacaattatctgatgtgctggaagggcgctatatctccgaaaaacgttttctgctggaagcgcaggtctgccaacaggaccgccagaagcgtatcagcacagccattaatgaagtggtgctgcatccgggaaaagtggcgcatatgatcgaattcgaggtttatattgatgaaaccttcgctttttcacagcgatctgatggtctgatcatttctacgccgaccggctccaccgcctattcgctctccgcaggcggccctattctgaccccttcactggatgccatcaccctggtgccgatgttcccgcataccttgtcggcacgcccgttagtcattaacagcagtagcacgattcgtctgcgtttttcgcatcgccgtagcgatctggaaattagctgcgacagtcagatagcgctgcctattcaggaaggagaagatgtgctgattcgccgctgcgactaccatctcaacctgatacatcccaaagactatagctatttcaatacattaagcacaaaactcggctggtcaaaaaaattattctaattttacgttagcctctttactgtataaaaaaccagtttatactgtatttaattacagtcatggtttttcatacaggaaaacagctatgttggcgcaactgaccatcagcaattttgctatcgttcgtgagcttgagatcgattttcagagcggaatgaccgtcattactggtgaaaccggcgcgggtaaatctattgcgattgatgccctgggtctgtgtctgggcggtcgcgctgaggccgatatggtccgtaccggagcgacccgcgccgatttgtgtgcccgctttgcgctgaaagacacgcctgcggcattgcgctggctggaagaaaaccagcttgaagaaggtcgcgaatgcttacttcgccgcgttatcagcagcgatggccgctcacggggctttattaacggcaccgctgtgcccctgtctcaattgcgcgagctcggtcagttgctgattcaaattcacggccaacatgcgcaccagcagcttaccaaacccgaacagcaaaaatcgctgctggatagctatgccaacgaagccgctttagcgcagcagatggctgctcgctaccaattatggcatcaaagctgccgcgatctcgcccatcaccagcaacaaagccaggaacgcgccgcgcgcgcggaactgctgcaatatcagttaaaagagttgaacgactttaatccgcaggccggcgaattcgagcaaattgacgaagagtacaaacggctggccaacagcgggcagttgcttacgaccagccagaacgctctggcgctactcgcggacggcgaagacgttaacctgcaaagccagttatatagcgcaaaacaactggttagcgagctggtaggtatggacagcaagctttccggcatcctggatatgctggaagaagccactatccaactcaccgaagccagcgatgaattacgccactattgcgagcgtctggatttagaccccaatcgcctgtttgagcttgaacagcgcatcgctaaacaaatttcgctggcgcgaaaacatcacgtcagcccggaagcgctgccgcagctttatcagtcactgctcgaagaacagcagcagctcgacgatcaggccgattcgctggaaacgctaacgctggcggttaataagcatcaccaacaagcgctggaaacggcgcaagcgctgcatcaacagcgtcagttttacgcccaggagctggggcagttgatcactgaaagtatgcatttactttcgatgccgcacggtctgtttactatcgacgtgaaatttgatgagcatcatctgagcaacgacggcgccgatcgcgtggagtttaaagtgacgacaaacccaggtcagccgctgcagcctatcgctaaagtcgcgtctggcggtgaactgtcgcgcattgcgctggctattcaggtgattaccgcgcgcaaaatggaaacgccagcgctgatttttgacgaggtcgatgttggcatcagcggcccaaccgccgccgtggtcggtaaactcctgcgtcagcttggcgaatccactcaggtgatgtgcgtcactcacctgccacaggtagccgggtgcggtcaccagcacttctttgtcagtaaagaaacagacggggcaatgaccgaaacccatatgcaacctttggataaacgtgcgcgtttacaggaactggcccgcctgttgggaggaagtgaagttacgcgtaatacgctggcaaacgcaaaagaactgctggcggcgtaaacttttttatctcccgaaggtctgagttcacaacaaaaacgccgtaagacccgacagcaaaaggttttaaagtgatgaaaggtctattatcatcggcatattaatatgagccacgtactgctcaggcccgaaaaggaacccaatcactatgcgctgtaaaacgctgactgctgccgcagcagtactcctgatgttgaccgcaggctgttccactctggagcgagtggtttaccgacctgacatcaatcaggggaactatcttacacctacggatgtcgccaaagtgcgtgttggtatgacgcaacaacaggttgcgtatgctttaggcacgccgatgatgaccgatccttttggtacgaacacctggttttatgtcttccgccagcagccaggacatgagaacgtgacgcagcagactctgacgctcacctttaacagcagcggcgtgttaaccaatattgataacaaaccggcgttgacgaagtaattttgtgataccgcctgatgaggttacgttcatcaggcctgcaaacctctcccccgccatttggtacgaatttgcctgatggcgctacgtttatctggcttacaggcacgcctgtgcttcaggtgtggtacggctttcacaccgttatccggcaaaagaggctaattatctaccagccgatttttcggcgcgctggcggcgtaatgcttttggatcggcgattaagggacggtaaatttcaacccgatcgccatcctgcaccgtatcggtgagttttaccggacgactgtagatacctactttatttttcgccagatcgatatccgtgcgcaattccagcaagccggaagcgcgaatcgcctcttcgaccgtcgcgccctcctccagcgttacgcgctgcaaatactgcttttccggcagcgcataagccacttcaaccacaagtttatccggcacggtaaacctctttggcgcgaaccgtaaacgcctgcaccatgttggacgctaactctttgaatatacgaccaaacgccagctcaatgagtttattggtaaactcaaaatcaagctgaaactcaatacggcacgcctcggggctgagcggggtaaatttccagccgccgatcagctttttaaaggggccatccaccagatgcatcagaatgctctggttacgcgttagctgattacgcgtcgtaaacgtcttgctgatacccgccttcgacacgtcaacagccgccgtcatctgtgctggcgatgactccaggacgcgactaccaacacacccaggcaaaaactggggatacgattgcacgtcattcactaactgatacatctgttccgcactgtaggggactaaagcagtccgactaatctgaggcatagcaattcccatcaacataaatcgtgtaaataataccacttatcagcgagtaaaaaaaatgctgtccccaaccgtcatgccttaattgtgcgtgcatagcccaactcatgctaagatagatttttgcacctcatcaggacgtaatggggtgttttcgatatcagattacctatgaattcacgacacttatgacgaagaaaaaagcacataaaccgggctcagccaccatcgcgctgaataagcgcgcccggcacgaatactttatcgaagaagagttcgaggctggtctcgccctgcaaggctgggaagtaaaatctctgcgcgcaggaaaagccaatatcggcgacagttacgttatcctcaaagatggcgaggcctggctgtttggcgcaaactttacgccgatggcggtcgcctcgacacatgttgtatgcgacccaacccgaacccgcaaactgttgttaaatcagcgtgagcttgattcgctgtatggccgtattaatcgtgaaggttatactgtcgtcgcgctttctctgtactggaaaaatgcctggtgcaaagtgaagatcggcgtggcgaaaggtaaaaaacaacatgataaacgttccgatcttaaagaacgtgagtggcaactggataaagcacgcattatgaaaaatgcaggccgataatagacattttttgtgaccagcttctcagtatgaagctggtcaatgttcatatctcatgcatgcctcgaaaatatattctctgtgtctgacgcttatcaatagcaataaataccacaacaagaatatattctttgtttaaaaatttttatagtctaataacacaatacttcaaatgatttttataaaatttaatattgctgaataccttcacaaaaagtattgtttttatgttaaaagagaaaaagaagaaaaaattaaaattcattataaaacataaagataaataaaaaattatcatgtattgttagcccaccctacatctccttaacacaaactccgttatatttcagacgcactaacacctttatcaatagatcttaatttgcagaaagatttttttctgactatatcatctaatacgaaagcactagtcaggcacaaaaaacaaagggttattcggcgagaaaaccagacctccacctacgctcataaaaaagaatatggctacggaaattcatctctcacgatgaacgggaaggctcgtctacgcattttgccctgaacgttgtgcccgttaattaatacacagagcaaatccatcaggagctgatttatgcgtctactcgccgtggtttcgaaattgactggcgtctccaccactgtggaatcctcagcggtcactcttaacgccccgtcaattgttaaattatcagtggcccgggaggaaattagtcaacttacgcgcattaatcaggatctggtggtgaggctccattccggcgaaacgatcacgattaaaaacttttacgttaccaacgatctgggcgcaagccagttagtactggcggaaaacgatggcacgttatggtgggtagaaaatccgcaagccgggctacattttgaacaaatcgctgatattaatgagctgctggtcacttctggcgcttcccatgaagcaggcggcgccgtttggccgtgggtactggctggcgcggtggcggctggcggcattgccgctatcgcgtcttccggcggcggcgattcccaccatcattcggatggcgataatccgccccccgataacaccaatcctgacggtaatccccctgataacagcaatcccggcggcagtacccccaacggcaatactccaggtagcagtaatcctgtagatactaccccgcctctcgctcccggcgaattattgatttcagcggacggaaaaacggtaagcgggcaagccgaagcgggcagtaccattaccatcaaagatccctcaggcaacgtcgttggcgagggcaaagcggatagcgacggtaaatttagtattgatctgacagcgccacagattagcggcgaacaacttaccgtgaccgcgactgacgatgccggcaataccggcccatcggcaaccattgatgcgcccaacattcctctccccgatacaccggttatcaccgccgctatcgatgatgccgctcccctcaccggcacgctgagcaataatcagtttacgaacgacaatacccccactctggagggcaccggcagcgcaggcacagtcatccatatttacgccaatggtcaggaaataggctcaacaacggttgataccagcggaaactggcattttgccattaccagcgcgctagcggatggggaaaatcatttcaccgccattgcgactaacgtgaaaggcgaaagtagcgaatcagcccgctttacgctgactatcgacacactcatccccgatgccccacgtgttgaactgattgccgataacaccggtttgctcaccgggccgctacagaataatgaccgaactgacgaggcaaaaccgctattttccgggcagggagacgcaggcaataccatcacgattaaagaaggttcaaccgttatcggcagcgctaccgtagacgaaaatggacgctggacctttacgccgactacgccgttaagcgatggcgaacatacctttaccgtcgaacaaagcgacaaagccggaaacacgagccgcgtgacgacaacgcctactatcattgtggacaccacgccgcctgacgccgctatcattgataatgttgcgaaagacggcacaaccgttagcggcaccgctgaagctggcagtactgtgtcgatctatgacccggcgggaaattacctgggctccacgattaccggagaaaataaccacttcagcatcacgctgaatccggctcagacccacggcgagcgtctggaagcgcgtattcaggacgccgtcggtaacatcggccccgccacggagtttaccgcttctgactcacagtatcctgcccagccgactatccttaccgtgacggatgacgctggcgccgttaccgggctgctgaaaaatggcgatgccacagatgataaccgcccaaccctcagcggtactgctgaaccaggcagtacgatatcgattaacgataatggctttcctgtagcgacctttccgcccattgtcgctgacgctgacggcaaatggagctttaccccctcgctggcgcttgccgatggcgaccatgtctttaccgctaccgcgaccaacgatcgcggcaccagcgggcagtccgtctcctttaccattgatatcgacacgcagccgccggtgctggaaggcctggcggttagcgacgtcggcgacagactcaccggcactacggaagctggcagtactgtggttatcaaagacagcctgggaaatacgctcgggagtggaacggcaggcgacgacggtaccttctcaataggtattagcccggcgaaaattaacggcgaaacattaagcattagcgttaccgataaagccgcgaatagcggtccggtagaaacgctgaacgcgccggataaaactgcgcctgcggcaccggacggtcttaccgtggcgaccgacggtctgtccgtaagcggtcaggcggaagccggggcaacggtcactatccgcgacagtagcaacaccgtacttggcagcgccgtcgctaatggcaacggacaatttatcgttccgctgaatacggcgcagactaacggccaggcacttatcgctaccgccaccgatgtcgcgaaaaacgaaagcgccgccgcgacggttatcgcgccggacagtaccgcgccagaaatgccgaaaaacgtggtaattagtgaggatggcaccagtatcagcggcaccgccgaaccgggtagcgccatcacgatcgccacgccggacggcaagccgcttggcagcggcaaagcagatggcgaaggtcattttacccttcccctcgtccccgcacagaccaacggcgaacaggttaccgtcaccgccaccgacagcgccaacaacgtcagcccgccaaccacagcgcaagcgcccgatatcaccgccccggataagcccattatcactcaggtactggacgatgttgaaagcttcaccgggccgctggttaacggacaaaccaccaacgacaaccgtcccacccttagcggtacggcggaggccggcgcgcgtgtcgaagtctttgataacggcttttcactgggactcgccacgctacagcccaacggtgcctggacgtttacgccgtcgcaaaatttaggtgaaggcgcgcatcgactgaccgtaatcgcaaccgacgctaaaggcaatgccagtcaggccgcgtcattcgacctggtggtcgatacgcaatcgccgcagcaaccggtaatcaccttcattacagatgatgcgccgggtattctcggtagcgtcgcgcatctggggctcactaacgacagcacgccaacgattaatggtacaggtgaaccgggttccacagtacacctgtatcagaatggcgcccggatagcagatattatcgtcggtaattccggcgtctggagctacgcttacaccacggcctcgccactggcggacgacacctacacctttaccgtgacggccagcgacagtaacggcaacaccacgcctttttcgaccgattttacgattaccattgatacccaggcccctgccgcccccggcgttatcggcgtagctgacggcgacggaaatacgattgataccaatcagattacccaggaatcccagccccggttgagcggtagcggcaccgcaggcgacacaatcatcctttacgataatggcaatgccataggtcaggcgctggtcggcacggacgggcgctggcagtttacgccgcctgccgcgctgggcgacggcgaccaccttctgaccgctcgcgccaacgatccggcggggaacgaaagtcccgaatccatcagctttaccctacgcatcgatacccaggcgccggatgcgccgcagatcgtgtcagccgccatcaccggcggagaaggcgaggtgctactggcaaacggcagtattaccaatcagcgtatgccgaccctcagcggcaccggcgaacccggcaccatcatcaccctgtacaataacggcgtagaactggctaccgtccaggtcaatccacagggtagctggacctatccgctaacccgtaatctgagcgaagggttaaacatcctgacggccaccgccacggatgccgcaggcaatagtagcccgacctccggcgttttctccgttacccttgatacccagcctccagcgcagcctgacgcgccgctaatcagcgataacgtcgcgccggttattggcaacatcggcaataatggcgcaacgaacgataccacgccgaccttcagcggcacgggagagatcggcagcacgataattctctacaataatggcagtgaaattggtcgcacaacggtaggcgataacggtagctggaactttacgcctgcggcactgacgccagaaacctataccattaccgtcacggaaaccgatagagcgggcaatatcagtccaccttccgcctcagtcacttttacgctagacaccactgcgcccgccaatccggttatcacttttgccgaagataacgtcggcgaagtccaggatactattgtcagcggcgcaaccactgacgacaatacaccggtcattcacggcactggcgacatcggcagcattattacgctctataatggcagcagcgttttaggcgtagtcaccgtcgatgagaccggcacctggacgctgccggtgaccagcgcgttgccggatggcgtctacaccctgactgccattgccgccgatgccgccggaaacagcagcggcgtatcgaacagctttaccttcaccgtcgacaccgttccgttgcagccgcccgtcgtcaatgaaatccttgacgatgttgcaccagtgaccgggccattaaccgatggcgcctttactaacgatcggacgctgactattaacggcagcggcgaaaacggcagcaccgtcacgatttacgacaatggcgtggcaatagggacggcgctcgtcaccgacggggtctggacattcaatacgcccgaattatcagaagccagccatgcgctaaccttcagcgcgactgacgatgctggaaataccacggcgcaaacccagccgatcactattaccgtggatatcaccgccccgcccgcgccaacagtccagacggtggatgacgatggcacgcgcgtcgccggaattgccgacccttacgctaccgttgaaattcatcatatcgatggcaccctggtcggcagcgctgtcgctaatggcaccggtgaattcgtcgttacgctcagtccggcgcaaaccgatggcggtacgctgacggcaattgctatcgatcgcgcggggaataacggcccggctacgaattttcccgcttccgacagcggtctgcccgccgtcccggccatcacggcgattgaagatgatgtcgggagcgtacaggggaatattgcggcgggcggcgccacggacgacaccacgccgacgctgcgcggcaccacggatatcggctctaccgttgaagttttcattgatggcgattcggcaggctttgccaccgttgacgccagcgggaactggatctttgagatcgcgacgccattaagcgaaagcacacattacttcaccgtccaggcaaccaatgcgaatggcccgggcggcctgtccgcaccggtcgggatcactgtcgatcttagcgcgccggcgcaaccggttattaccagcgcaacggatgatgtccccggcatgaccggtacgctggataacggcgcgctcaccaatgattcacgcccgacgctcaacggaacgggagaagctggcgccacgatccgcattctggataacggcgtagaaatcggttccgccacggtagatcaaagcggcaactggcgcttcaccccgaacgcgccgctggagagcaacgcgcacatctttaccgccgtagcgaccgatcccgccggcaatagcggccagccttcggacggctttacgctgaacattgacgcgcaggcgccagatgtgccggttatcacctccgtgattgacgataacaatcaaccgaccgttccggtgttaccggggcaatccaccgacgatcggcagccaatactgaacggaactggcgaacctggcgcgacaatcaccatttttgataacggtacgccgcttggcacggctcaggtaggcgaaaacggtagctggaccttcccggtgccccgcaatttgtcagagggaagccataatctgacggttagcgctaccgatccggcgggcaataccagcgcggtctccgcgccgtggacgatcgtggtcgatattacgcctccggcgatcccggttctcacctccgtcgtggatgaccagcccggaattaccggcaacctggttagcgggcagctaacgaacgatgcgacgcccaccctgaacgggcgcggagaggcaggcgcgacgattaatgtctatcttgacggtaatcccgcgtccatcggtaccacgacggtgaatagcgacggcacgtggagtttcacgccgcagacgccgcttgcaaacggtagccacacgttcacccttagcgccaccgatccggcgggtaatagcagcgcggtgtccagcggatttgtgctgacgattgacgccacaccgcccgccgcgccggttatcgccagcgtggcagacaatacggcgccggtaacgggcatcgtccccaacggcggctcgacgaacgaaacccgaccaacactctcgggtaccggtgaggcgggtacaaccatctcgatttataatggcagcgcgctggtcggcacggcgcaagttcaggccaacggtagctggagctttacaccgtctacctcgctgggcgcgggcgtctggaacctgacggcgacagcaaccgatgcggcaggcaataccagcgccgcgtccgaaatacgctcgtttactattgataccacggctcccgccgcgcctgttattgatacggtctacgacggtacgggccccattaccggcaatctgagttcaggacagatcacagacgaggcgcgccctgtcattagcggcacccgtgaaaccaacacaactattcgtctctacgataacggcacgctgctggctgaaattcccgccgacaatagcagtagctggcgctacacgcccgacgcctcgctggcgacgggcaaccatgtaattaccgtcattgccgttgatgccgcaggcaacgccagccccgtttcggacagcgttaatttcgtcgtcgatactacgccgccgctgacgccggtaatcacatcagtcagtgacgatcaggcgccaggcctcggcacgatcgcgaacggccaaaataccaacgatcctacgccaaccttcagcggcaccgcagaagccggcgccacgatcacgctctatgaaaatggtacggtcattggcacgacaacggctcagcctgacggcgcgtggagcgtctccacctcaacgctggcaagcggaacgcacgtcatcaccgccgtcgccaccgatgccgcaggaaacagcagcccgaacagtacggctttcaccctgacggtcgataccaccgcgccgcaaacgccaatcctgacgtccgtggtggatgacgtcgcgggtggggtcacaggaaatctcgctaatggtcagataaccaatgataaccgccccacgctgaacggcactgccgaagcgggcagcgtggtcagtatctatgatggcgacactctgcttggcgtcacctcggctaacgcgagcggcgcgtggagcttcacgccgacgacagggttaaacgacggcacgcgcacattaacagtgaccgccaccgacccggcaggcaacgttagcccggccaccagcggttttactatcgtggtcgatacccttgcgccaacggttccgcttataaccagcatcgttgatgatgtcccgaacaacaccggtgccattggcaatggacaatcgaccaacgacacacagccgacgctcaacggtactgcggaagccaacagcgcggtaagcatcttcgataatggcgcgctggtcgcgaccgtgaacgccaatgccagcggcaactggagctggacgccaaccgccgcgctcggccagggaagtcacgcctatagcgttagcgccgccgatgcggctggcaacgttagcgccgcttcgccatcgataacgattatcgtggataccattgcgcccggcgcgcccggcaacctggtcatcaatgctaccggtaatcgcgtgacgggcaccgcggaagcaggcagtacagtgacgattacctctgagactggtgtggtactgggaaccgccaccgccgacggtacaggcagcttcaccgccacactcacgcccgcgcagaccaatggtcagccgctactggcatttgcccaggataaagcaggcaacacaggcattgccgccggatttaccgcgcccgatacgcgcgtgccggaagcaccgatcatcaccaacgtagtggatgatgtgggtatttataccggcgctatcgccaacggccaggtcactaatgacgcacaacccacattgaatggtaccgctcaggcgggcgccacggtgagcatttataacaacggggcgctgctcggcaccaccacggcgaacgccagcggaaactggagctttaccccgacaggcaatttgaccgaaggcagccacgccttcaccgccaccgcgactaacgccaacggtacaggcagcgtctccaccgccgcgacggtgattgtcgatacgctggcgcccggtacgccgtcaggtacgctcagcgccgatggcggttcactttccgggctggcagaggcaaacagcaccgtaaccgtcacgctgacggggggcgtgacgctcaccaccaccgctggcagcaacggcgcatggtctctcaccttgccgacaaaacaaattgaaggtcaactcattaacgtgacggcgactgacgctgcgggtaacgcctctggcacgttaggcattaccgcgccggttctgccgctggcggcaagggataacataaccagtcttgatctgacctctaccgccgtcaccagcacgcaaaactattcggattacggcctgctgctggttggcgcgcttggcaatgtcgcctcggttttgggtaacgataccgctcaggttgagttcaccattgctgaaggtggtacgggcgacgtcaccatcgatgccgccgcaacgggaatcgtgctttcgctgctcagtactcaggagattgtggtacagcgctacgacaccagcctcggcgcctggacgacgatcgtcaacaccgccgttggcgacttcgcgaatttgcttaccctgaccgggagcggcgttaccctgaacctgagcggcctgggcgaaggccagtaccgggtactcacttataacaccagtctgctcgctaccgggtcatataccagcctggatgtcgatgtacaccagaccagcgcaggtattattagcgggccaaccatcagtaccggcaacgtcatggctgatgataccgcgccgacgggcaccacggtcaccgccatcaccaacgccaacggcgtcagtacgccggtcggcgcgggcggcgtggatatcctggggcaatacggcacgctgcacattaatcaggatggcagttacacctacacgctgactaagcccacggcgggatacggacataaagagagcttcacctacaccatcacccagaatggcgtcggtagcagcgccgcgcaactggttattaatttgggtcccgcgcctgtaccgggcagcgtgatagcgacagacaataacgcctcgctggtctttgatactcacgttagctacgtcaacaacggcccctcgacacaaagcggcgtcacggtattaagcgtcggacttggtaatgtactgaacgcgaatctgcttgatgatatgactaatccgatcatctttaacgttgaagaaggcgctacgcgaaccatgacgttacagggaaccgtcggcggcgtctcactggtttccacgttcgatctgtacgtttatcgcttcaacgatgccattcaacaatatgagcagttccgggttcaaaagggctggattaacaccctgctgttagccggacagtcccagccgctgaccctgacgttgcctggcggcgaatacttgttcgtgctgaataccgccagcggcattagcgtcctcactggctatacgttggcgatttcccaggaccacacctatgccgttgacagtatcaccgccaacaccaccggcaacgtactgaccaatgatgtcgtccctacggacgccctcctcactgaagtaaacggcgtggcgattgcggcgaccggcacaacggaggtaaacgggctgtatggctcgctcatcattgacgcaagaggcaactatacctacacgctgaagaacggcgtcggcgccgacagcattaaaacgccggacagctttatctatacggtcaaagcgccaaacggcgataccgatacggcctcgctcaatatcacgccaaccgccagggcgctggatgcgattaatgatgtcagcgataccctcagcgtcgccacgcttcaggataccgctgcctggctggactccagcgtcggcagcgccagttgggggctactcggcaaatcgggcagcgggagcggcacctttgacgttgcaacgggcaccgtacttaaaggcgcgtcactggtttttgatgtctccacgctcattacgctgggcaatctgaatattagctgggccattcaggagaacgggaccgtcatacgcaacggaaccgttccggtggcgaatatcacgctgggcagcgcgacggtgaccgttaacctgagcggcctggagctggatgccggaacgtacacgcttaactttaccggcaccaataccctggccggggcggcgacgatcacgccacgcgtcatcggcaccaccgtcgatctggataattttgaaacgtccggaacgcataccgttctcggcaatatttttgacggcagcgacgcggcgggggcgatggatcagcttaatacggtgaatacccgcctgagcattagcgggtataacggcagcgccgccacgctggacgccgcggcgaataccaccagcgccacgattcagggacattacggcacattgcaaattaaccttgatggcgcttacacctacaccctgaataatggcgtcgcgatgtcgtccatcaccagtaaagaggtctttacctatcaactggatgacaagatgggtcatacggatagcgccacattgaccattgatatggcgccacaaatcgtcagtaccaaccaaaacgatgttctcatcggctccgcctatggcgatacgctgatttaccacctgttaaacggcgcggacgcgaccggcggcaacggcgtcgatcgctggcaaaacttctctaccgcgcagggcgacaagatcgatatccacgaactgctgaccggctgggatcaccaggcggcgacgctgggtaactttgttcaggttcataccagcggcgccaatacggtgatatccgtcgatcgcgacggcaccggcagcgcgtttaaatcaaccgaccttgtcactctggagaatgtgcagctcacgctaaatgatctgttgcagaacaaccacctgataaccagcggttgataaaaaagccccgaacgccacgacgttcggggcaacaagcggtgatatttaaaagggataaactatgggaagagtcgcgcctgtcgccatcgtactggcatttgctttgtttcatcaccagccccggggcgcagaagcgccgccaatgattacatccgaaggattagcaacggaccagatgcttccttcgctggatggctccgccgctgagttgccgctcagcgccgccgcgccgggcaacctgacgctcaatgacgcggtcaatcgcgccgttaactggcatccttctattcgcgaagccatcggcaaactgctcgcacagaatgaacaaatagaggtcgccaaatcgaaatattatccgcaagtcagcgctggcgtgaacaatgggtacagcaatacctacaccgatcacgggtatagcccctcgctagtgctgtcggtatcgcaaatgctttatgacttcggcaaagtggcaagccaggttcgcgccgaaaccgcaggcgcagcgcagcaacaggccaatgtgttgctcagtattgataccgtcgcgcacgaaaccgccaacgccattgtacaaacgcagagctggcagcaaatggtagaagcggcggaagaacagctcgtcgcgctggacagcatcggtaaacttatccggcagcgcagcgatgaaggcgctacgtcgctctctgacgtggtgcaaaccgaagccagaatcgaatccgcccgctcgcaactggcgcagtatcaggccaatctcgacagtgcgaaagcctcactgatgagctggctgggctggaattcgcttaacggcatcaataatgacttcccggcgaaacttgctcgcagctgtgagacggcgactcccgacgatcgactggtgcccgcggtactggccgcctgggcgcaggccaacgttgcgcgggcgaatctggactatgccagcgcgcaaatgacgccgacgatttcgctcgaaccttctgtacaacattatcttaatgataaatatcccagtcatgaagtgctggataaaacccagtattccacctgggtaaaagttgagatgccgctttatcagggcggagggctgactgcccgacgcaacgccgccagccatgcggtagacgcggctcagtcgaccattcagcgcacccggcttgatgtccgccagaaactgatggaggcgcgcagccaggcaatgagtcttgccagcgcgttacaaatccttcgtcggcaacagcagcttagcgaacgtacgcgcgaactgtatcagcagcaataccttgacctcggttcccgcccgctgctcgacgtgcttaatgcggagcaggaagtttaccaggcgcgttttgccgaactgcaaacggaaagccagttgcatcagttgcaactgaactgtctgtataacaccggcgcgcttcgtcaggcgttcgcgttaaatcatcgcagcattcaatccgtggagatccagccatgacccgcgccgcccccgatgtagaagaggtactcagtgagcgcgcgctaagccaatgggcgcaggccatcagctatgtcgccggtcattatcgcgttgcctgttctcccggttcaattcaggccaacgccccgtggcttaggggtaaaagcagaacgaccgccttaacgcagctcgcgcggcaggcgggtttatcctttcatgcgccggacatagacaaaacggcatttagtcagtggcgattgccgttggttgtcgagctccgggacgggcagttattggtcatcgaacatgttaatggcgaagaggcggtagacgtttttgtgattgaagaagagggtcagcgtaaccgcctgacgctcagcgagttattgccggagatcctctatgttgccgcgctacgcccgctatcggcgctcaaggatagccgcgtcgaccgctatatctcccgctttaaacccgactggatgcgcgagctggttctgcaggatattcgcccttatttaccggtaatggtcgccgcctttctgattaacgtgctgtcgctggccgggattgtgttctctatgcaggtttacgatcgggtgatccccgctcagtcatatcctaccctgtacgtgctctccttcggcgtgctggtagcggtgctgttcggttttctgctgcgtgaagcgcgtacgcacattatggacgtgctcggtaaacgcgccgatatgcgcatttccgatcgggtattcggtcacgcgttaaggctgcgcaacagcgctattccccgttccaccggcagttttatctcgcagttacgcgaactagagcagatccgcgagatgattacctcttcaacgctggcgaccattgtcgatctgcctttctttttcctgtttatgatagtcctggcgattattgccccaccgctggcatggatagcgcccgtggcggctctgctgatgatcctgccgggcgtcgcactgcaaaaaaaactggctgtcctcgccaaccaggccgcccacgaagcgacgctacgcaatgcagtcttggtcgaaagcgttcaggggctggaggatattaaactgatgcaggcggagaaccgctttcttcagcagtggaatagctatatccgtattaccggcgagtcgggtctacgcacccgcaaactcacgcaagggcttatcagttgggggatgtcggtacaaagtctggtgtatgccgcagtgattatgttcggcgcgccgatggttattgaaggcagtatgactaccggcgccgtggtcgccgcgtcgatgctcggctcgcggatgatcgcgccaatggctaacctgtgcggcgtgctggcgcgctggcagcaggtgaaagcggcgaagatgggtctcgacaacattatgcaactgcccaccgagacacagcatgacgatagcctgatacaccgcgacatcctccacgggcattacctctttgaaaacgctcagtttcgttaccataacgacgatcaacgcataccgttgcgcctcgtgcgtctggagatcatgccaggcgagcggattgcgatactggggcgtaacggtgcgggtaaatccacacttttacaggcgatggcgggcggcctggagatgattcagggagatgcccggcttgataatctcagcttgtcgcacatcgatatggcggatttacgccgcaacatcggctttcttagccagaacgcgcggcttttcttcggcaccctacgagagaacctgacgctcggcgcgccgcacgccaacgatgaacagatttttgacgcgctcgaagtcagcggcggcgccgtcttcgtcaggcggctggcaaaagggttggatcatcccattatggagggtggtaacggcctgtccggcgggcagcgtcagtccctgttgctggcgagaatgctgctgcgctcccccaatattgtgctacttgacgaacccagcgcctcgctggacgagcatacggaacgagagtttattcagcggttacatcagtggcttggcaatcgaaccctggtcgtcgcgacgcaccgggtaccaatactggagctggttgagcgtgtcgttgtcctgaaagaaggacaactggtgatggatgcgccaaaagcgcaggcgcttaacgcggatcggatgcaaagtcaccgtcgggagtggaaaaatgaaaatcaatcagcatgatgccgcgatggacgatcccgatattcagcgtgaacgggcgttttccggcgcgggtcgtattgttctgatctgctcactgttatttctcattctcggcatctgggcgtggtttggccgactggatgaggtttccaccggcaacgggaaagtgatccccagttcacgcgaacaggttctgcagtcgctggatggcggcattctggcgcagttgacggtgcgggaaggcgacagagttcaggctaaccagattgtcgcccggcttgatccgacgcgtctggcgtccaatgttggtgaaagtgcggcaaaatatcgcgcttcactcgcctccagcgcacggttaaccgcggaagtcaacgacttacctctcgccttccccgctgagctgaacggctggccggatctgattgccgcagagacgcgtctctataaaagccgccgcgcgcagctggccgataccgaagccgagctacgggatgcgctggcgtcggttaataaagagctggccattacccagcggctggagaaaagcggcgcggccagtcatgttgaagtgctgcgcctgcaacgacaaaaaagcgatttaggcttaaaaattaccgatctgcgctcacaatattatgtgcaggcacgcgaagcgttatcaaaagcgaacgctgaggtcgatatgctctccgccattttaaaaggacgcgaggattccgtcacccgccttaccgtgcgttcaccggtacgcggcattgttaaaaatatccaggtcacgacgattggcggcgtgatcccgcctaacggcgagatgatggagatagtgccggtagacgatcgtctgctgattgaaacccgcctttcgccgcgtgatatcgcctttattcatcccggccaacgcgcattggttaaaattactgcttacgattacgccatttacggcgggcttgacggcgtggtggagaccatttcaccggataccattcaggataaagtgaaaccggaaattttctactatcgcgtatttatccgcacccaccaggactatctacaaaataaatcaggacgccgtttttcgattgttccaggcatgatcgccacggtagatatcaaaaccggtgaaaaaaccattgtcgactatttaatcaaaccgtttaatcgcgcgaaagaagcgctgcgcgagcggtaaatcgttgaagataagaagatacgggggctggtcacgcgtgtcacaagtctgttatacttatcttacacattggggctgattctggattcgacgggatttgcgaaacccaaggtgcatgccgaggggcggttggcctcgtaaaaagccgcaaaaaaatagtcgcaaacgacgaaacctacgctttagcagcttaataacctgcttagagccctctctccctagcctccgctcttaggacggggatcaagagaggtcaaacccaaaagagatcgcgcggatgccctgcctggggttgaagcgttaaaacgaatcaggctagtctggtagtggcgtgtccgtccgcaggtgccaggcgaatgtaaagactgactaagcatgtagtaccgaggatgtaggaatttcggacgcgggttcaactcccgccagctccaccaaataaaacaaggggttacgtgaaaacgtagcccctttttctttggtagtggcggcaaaatggcgacagcgtgtcggactggcggcaacaaaaaacccgccattaaagcgggttctgttcagaaactcatgtggccttgaccaccttttcccggatgtggtggcgcagaagaaattagattcggttttataatgtgccgtacaaacgtttcatgagtaacgaacgtacagccacaatttatattttggcactggttgtaacgttcttttgtcgtagctgatacctgaaagctgcttctggtatgtgctgcatgaccgcactctggacagttcatcattgctgttatcccaccacttttgccataatcgcaataatgatacagcattattcaatattgagaaccaatcattcaatttcaagatcatcaatctttacttcaagctccatgctggtcgtaaatccattatccgggctgacagaatgcgtcagggtggtaatggtccattctgcatcatcaatcggctgcttaaatcccgtcaccttcaccggcatttccgtatagagatcagcccgcccctcagcgagctgtagggaaaatgaagcaaccccgcgctgcaggcgttcccactgcatttttgctgcgcgctctgcattgctccggttggcgtaggtacgattaagaaccaacacgttttcatccgttcccaccagataatcaccctgttttgcttccggctctttgggtgtggtggctttctttcgacgacgcttaacactggttgtctcttttttcctgggttcacgcgtatgcaaccagctggcaataacaccggtataggcaccacgatcagcaagggtgaaccgatgaccgtcaccggctttgcgcgtgatggtgataaccggcagcggcttgccgcttgccgttcttccctgtccctgccggataaacagcaggttcccgtctttaacggaagcaatcgccccatactgtctcgccagtttcatcagaaaacttgcatcgctttcattggtctggtccatatgatccagcgccttatccgtcaggtcttgacccagcgccactttgaggttatgccgggcggcgatttcctttaccacctcccccaccgttgtctgatgccatgatttttcgcgccgtgtattgagggtttcacggaaatctgcgctacgcgccctgatggtcagccggtcaggggctccgctgtgttcaatttcatctacggtaaaagcccctttagggaaaagcggctggcctttccagcccagcgccagatgaataacagcaccacggcgcggcagaacgatctgcccgtcggcgtcgtccagctccagatcaagctggtctgcttcaaagccccggttatccgtcagtgtcagactcatcaggcgcgcgtccatcaccgtcgtcacgtctttgccttcgatggtgatactgaaagccgggcttttgctgttcagattcaggagatcagaattaaagttcactgcagcaaccctccaaccgtgtttttaatccccccaatagcagatgctgcagagtcctgcaggttgctgagctggtcactcaggctcccgaacatgtcagagagcgactcatcaacccgtttgagggtgatcgtaaactcaatgcgcctgggcattccgctggcaaaaaactccgtctttgtctggctcagactctcaataacaaacatgccgtaaatggttccactgccttcaatcaaaggccatgccttgcccagttcagccatttgttcaagcgccagtaatgacagcctgcctccggtcacttccggcagcagaaccccggacagtgtcagtgaatcattatccgggccaagaaactgcgttgacgggcggcggttcacccggctgttggcggtgtgtcgccagctgcgctgatactgcagttcctgataagggacagtgcgcagcataaatacatataaacccagcaccatcatcatgattcataccccccctgatcgctgaaattgctgcgcgcttttgccctggccctgcgttcccgctcgtcaagctggcgtgccacttcacgggcaatatcctgcgcactctgtcccggctgcgcgacgatatgaatgggcgcatttatctcataacgaataactgacggcgggctgtcagccttaactggctgcgtctggtatgtcctcgcaggcagactgaacggatgaagcggagccacttctgcaggtgtcgcagctacccccatcacgccagcaacgacagaggccagcgcagcagtacgccgcctgctggtaacatttgccggtccgttcacaatttcagggccattttctccgacaatgccaaactgcccgcgtggaatgatcccgcccgtgtcgtacatcccagcgtaagccgggaacccgcctggcggcagcaccactttgccgtcactgttcactgtggcggactgctgctgcgtaacctgcgcaggtagtttcgcctttgccgcctccttactgacaataccgagcttttccagcagccatgacacaccggatttaagtgactcaagtgggtgcatcaccatattcagaccttccgccagtgcctcaccaaaccgacgccccattgcagctgcgctgttcagttcttcggaagtggatttaaccggggtaagtaaatcattgaaccagccccacaaggcctgcaccctgtcaccaatccactgaaacacgggtctgagcggctcaaaggcagcgctgatgggcgcagcagcggctttgaacccttccaccacgccccccagaaacgcactgatgggctgccagtatttccagataaccagcgccacgcctgccagtgcagccacaaccagccctacaggactgagcagcgcacccagcaggctaccaacagcaaataatgccacgcgcagcaaagccagcggaccagagatcaacaaacgcagcacgctacctgtacgtgtggcagcggcggctgcagaaggtaacgctttaactgacagcatggacaggccaaaccggataaccgccagcggtcccagcacagcagccaccgccactgccagcgcccccaatccaacagtgatggctgccgtagctgccgccactttcatcagcgtgccagccagcacgggattctgctcaacccagcgacgcaacgccccggtcacgcgcttaaccatgcccataatatccatcagcggctggcgcagcgtttcccccaggctgctgaaagcgttctgcgcgcccgtcttaaccagcaaccactgtgcagacaatgaatccttgttaatgtcggattctttctgcatggagccattagcaccactacctgatgtgagtttcagctggcgctgcagctccggcaggttgttagccagctttgccgcatcatcgccaaactctttgccaaaaatcattgtcatggctgacaggcgtttatcctgcggcagattgttgaccttctccagaacccgctgaattgtgcccatggcatcggtggtcatctgcttttcaatctccgccggattgagttgcaacagattcatgccttcaaaaaatcgtttactttgcatggtggcaatggacagttcacgcaccatggcattagaggcgctggcggcgatttccggggcagccccaagagaaaggaatgttgaacccagcgccgcggcctttcggaagtcaaggcggtcagccacgccccccatacgctgcaggacgttgataatgtccccaccctttgacatggcgttatcgtccaggtagttcagcgcatcgcccagttgttcaatattgcgcgtcggaactttatagagctgcgcgattttccccagcccttctgccagttcatctgcgggcagctcaaaggccgttgccgcttttgccgccgtggatgcaaaagccagcaggtcacgtttctgctcttcgtaaggatcgtcctgattggtcacccccatgcgagcaccaccttcaaccagcgcggcatagtctatagcgccgttctccatcggcagctgttcgctggcggccttgatggcatcctgcatgtcataaaactgttttgtgcggttgccattatcgtctcgcagcccgtttacctgctttgccacgcctttcatggcatcttccatgctggcgtagctcttaactgccgccacaacaggtgcgcccattgccacccctgcagccgtagtggtagcccctgccccggcgatgcgatcccgcacctcaagacggcgcgaatactgatcgcggacggcgttcattcgcgcctgctgttcgcccaggcgtttaagggatttctgctgccggtccagggcctgccgggtttcgtcggcattctgccgcagttcccgctgcgcactactgagctttttcgtgtccagtccggcttcattgagcgcaagacgctggcgctgcactgactgacgtagaccgttatatttgctctgtaactccgtaacgcggttctttgcctgctcaagcagccgtgcctgcgccgccgtcgggcggttggtggcagagaattgcgtggcaagtttcgcagcttcttcgcgtgcggctttcaggctgttaccggtgactgccagctgcgcgctggccttgcggaaaccgtcaatgcggcccgcctgagcatctaattcttttaaacgggcgcggctttgctgaatcgctgtagccagctcttttgagctggcctgcgcggatcgaaatgggcgggtgagcttgtcaaccgcattaagaatcacctgcagacgcaggttattgtcactcatcgctggccccgcttcgctgaattgccttataccgccacgccagcacctcagtcagcggcataacgtcagtgatggatggcgaccagtgaaagatggtggcgatatccgccacaagatcatcaatcgtcaggctgtcggtaaaccggcaagcaccgacttcttcaacaaaaaagtcaccacctctaccgacagcgcggtgagatcggcggggtccagctctgccatttcctgcgcggtcagcgtcggggtggagattcgtgggatcacagtcatcattgcgcccacgtccatatccataatggcctgcagacgggtgccacgcagtgcgccggactgaggcttgcgcagcacaatttcggtaatttcagttttaccgcgcatgatgggagtatccagttttacggtcttttcagtcagcttgtcgctcatgttcgtatcctgttaatgaaatactggcgcggctgcccgcgccgttaaggttaatcagaggccgagggcattacggtgtgcttccatcaggtccacgccgccaacgatttctaccatgttgaccagatcgacctcatagagcacctcaccattaatggtcagcttcgcgtagctgttggtactgctgactttggtgctgctgctctcgccggttttccactcgccggaatccacttctttatggcgcccgcgcacaaccagctcaacggcctgcacttcgccggtatcgtcacgctgaatggaaccggtgaaacgcagctggatgccgtcaacggttgccttgcccatctgcttgaataacagcagctcggtaccgccgattgaaaattccgtgtccagtgcaccgtcatccagccccatgtccacatccactgcgcccggcataccgccgccgcgatacttctcaaacttgcgggtaaatttcggcagggtcagagactcaacgatcccctgccagttgttcccgtcgttgaacaggttcaggtgttttaacttgcgtggtaaagccatgattcccccttatgcagcgacacggctggcaaaatcgaccaggtaacgatcggtgatgcgctggcgcagcatcaggttttcaagcggaggcaccggcgtgtagtcataatcgatggtcagtttcccggctttaagggtgtctttatcgttaacagactcatccagccagcagtcaccaccaatcaggtatccctggttgaccagactgcgcatcttggcgcgtagtccttcaataatgtcgcgggccagcgacggattaagcacgccatccaccgcccacatgtgcgcctccgccatagtgtcagccagcacctgcgccgtgcgggtgtagttctcaaaggcaaacagcggatcgtcactgagacaacgggaaccccagaagcggaagccgtctttgcgaatcaatgtggtgacgtcatttttgttcagcagtcccgcatcggttgccgggtcctgcagatcccagaacacatcagcggaaatgccggtgacaccgttcacacccacattggacagggttttatgccagccgatctgctcgtcgattttggcacgcaggccgagcgcacgggcggaggcgtaagccgtcgcgtctgctttcagcacggtgtcaaagttgatgaagtcaggccagatcagcattccctcgcgctgactgaaattctcgcgataggcaatagcttcctccaccgttttgcagccattagcagcaaggtaggcaaacccgcgcaagctttgcgccacgcccagcagttcagtagcaacggcctgagtgtcatgtcccggcaccccaagaatgcgcggcttgacaccgagctgcgactgcgccgacagtagagctttcatgcccgttttcttaccgtcggaagttacgccgccgataatattggaggtggtttccgcttcggtttctccctgcgccacacgcacaacgacagtcacgggttttgcctgatctgcaatcgcgtccagcgagcgggccagcgtgccggactcccccgctttaccgctggcggtgagcacatcagtcagcaggaccggcttattgagggggaacacggacgcatcagcatcatcgccggtgcagaccatgcccacgatggcagtgctcaccgtggtaataggtcgggtgccctcgttgatttcaacaacgcgcaccccgtggtggtaatcctgagccataaggcagtctctccggttgacagggataccttatgttctggttgccaggcgtgcggcgcacgtatttcacgatgtgtcagtgctggtacaatatcgccactttcaacgcgactgatttacagggaatttcttgtaaagagtggaaatgctaacatcaaaaagcaatccaacacgatgacgagtttcaccggcggcaagcaaccgtccggcctgctcccattgctccggagtgagctttggacgcctgccaccgactcgcccttgcgccctcgcagcggcaagtccggcgcgggttctttccacaattaattccctctccatttcagcgagtgcgcccatgatatggaaaaagaaacgccccattgatgtggaagtatctatgctatccgtaagactgcggaaattaatgccacgctcccgcagctcctctaccagaacgaccagatgacgcatactgcgacccaggcgatcaagcttccatacaaccagtgtgtccccttctgataacgtcctgagcaacttttttaatccgggcctttctgatttggtcccgcttattttgtcttcaaaaatcagttcacatcctgcgcaattcagcgcgtttcgctgtaaatcagtattctggtcatttgttgacacccgtacatagccaatttgcacaacaggccccctcgcaaaaggctgggatcatgccatttacgaccgttttctgcattttcataaacctcggtttaggcgaaacagcaaagcaagctgcgggcgcagtccagaaaactggcgatgagatgagcgggaagttaaccctgccacagacatcttccttcggcgtgaatactaacaacacactgggcggtagttccatcgctatcggtgataacgataccgggctcaaagggaacggcgacggtaatctggcatttatggctaacaacgtgctggcaggatattttaatgaaaatgaattgcagcacagtaaaaagatgctgactaaaaattttcaggctcttgttgataataactggccggagggggcggggggattttctggtcagttaagcagtgaagcaccgtttagtgtaccaatggttcaccgtcagaataatgataataattttttcccgctcctgaaaggaaaggtctcactggagtctggctatcctgtagccgcctctttcggaatattaactagtgggaatactaatttcccacaaattgcaattcatgcaaaaacagactttgatgttaacgataaaatatgggtatttgatgttgcaaccggagaatttcgcgcaccgggaaggattactgctacagaaattttattgagcggtaaaagccgtgttggtcctgatggtaatttatatggtgatgtgtggggtggctggctgaatgacttccttattaataattacaaccgtaaaaatactgccagcctcggtgattatggctgggttcgtgacgaaagcaccgggtttataatgcaatgggggacacttggtagctcaaacggaacctacaatttcccgcgagagtttccgacatcctgctttgctgtatttgtcaccaacactaatcagcagggaggttcagtggataatgcgtttggatacccggtgagtaaaagccagttttttgccgcaactaaagcatcaacagacggaaatgtcgtaaatggctatcctgtagcctggtttgcgatcgggagataattatcaatgagcgattattattacagctttaaagagaaaggttttttctacaagccggataccgaatcgggcgatttcccgactgatctaattcctctgactgatgaacattaccatggacttatgcagggtcaggtggacggaaaatatattgagcacaggaaaggaggcccggtactggttgagcatcgcgaatatacgcctgaagaactggttgcacaggctgaatccagaaaagcggaacttcttgctgaggcagagtcagtcattgcgccactggcgcgagcggtaaaattaaaaatggctacagatgaggaaatcaagcggctggaggcatgggaactctacagcgtactggtaaaccgggtggatacctcaaaccctgactggccggataagccagtcagccagtagtcgttattgtggtaatgcaggccacctgattgcggtgaaggtggcctcatctgaaacgtctgttaagtcaagcgatttaagaacattgatatagttcatccacaaaatcaaagccgctttattttcatcactgataattcccaacgttaattctgtgcgccagtccttaatggcattatctgcatcgttaagtaatttctgtcgggtggtttcggccttagcctgataatccaccggaacgggtaaaaccttaccatctctgtacaaccatgagccatcaccacgacaatcatcaggacagtcagcagcgtctatttccgcaacagacatattaaccggccacaacattgatacagcatatgtgtttccacgttgcgggactggatgattaacaacaccccagataaccccttcaggatcgtacataatttttgcagtatcatcagaaaataatgactgacattcataccagtcctgcccgtcttccgattccaggaaatatgcacctatatttatttcggcctgagttttacccctgcttacggggtcgtcaataagtctgaaatttttgatattctgatattttttcattatgccgttcccccttgtacggtataccactgattcccgactcgtttttgcaaaggcgcataattaataccatcaatattttcgccttgtgcatctttccagacggaggtaactacatatccgggagtgttaggccaggaacctgcattgttccaggtagtcactgatgtgccagcccctaactgaacatctgcgacgaaattattattaatccacagactcagccagctattcccccagacagaaccaaagatgtcgccgttattctgatagatggccccgcctgcacgaagcgtgttagcggtgatatcgccattgaccgtaaagacaatcgaaccatcaggatttcgctggctgtataaatgccatccctggtcgtcgtccagttcaatcactgtaggcctgtttgcgtcgccccataaattaaacgtggctgtcattgtcgaattattattactcgtcagtgacagttttttttctttgcctgcgcgaatagctcccagaaccatcatttcaccgggagcgacacgaacggtgtgctggctattcgcaaacgtatccagtatcccgtcaccattctgtttaaagccggtatcgttatcaccaatagcgatggaactaccgcccagtgtgttattagtattcacgccgaaggaagatgtctgtggcagggttaacttcccgctcatctcatcgccagttttctggactgcgcccgcagcttgctttgctgtttcgcctaaaccgaggtatgtgagaaggccggcgatatcttttccgcttaaattcgtcagtgtattgtccagcggttgctttccagccagagcgtttatcatcgtcgtggcaaagttcgggtcattccccagagccgctgccagctcgttcagcgtatccagtgctgcaggcgcagaatccaccattgccgcaatagacgatgccacaaattccgtgttcgcaatctgtttagtgctgttacccgccgctggcgtcggtacctttggaatccctgtgagtgtcgggctgtccttctgcgcatactgtgaatgcgggtccggcgcagcaagatgctttgccatcaggtcgtctacatataccttcagctccagcgccttatcatctacatatttacgggttgccagcactactgcagggtcaattttcagggtgatgttatcggtgctactggtaatcagtaccatgcgcacggtctgcgtacgtccgctcccttctgtcagctgcggcttgtagctctcagggcagttacccacggcgatcagtgcgccggtttcatcaaacaggccgacctcacgaatccaccatcccccctcagtttccgggatcacttgctcagcaataatctggctgctgttctgcgggtcgatatacagcatattcagcgctgctcgacgcttctcagcaactaacgcggtctgttgcgcgctgggtgtgggcagcacaccgccaccgtcgcccaccgccatatgggtaattttcagcgggacaccgagcgcggcggcgcttgccagtttcgccgcgccgatctccgtcagcagggtataaaattttgcgctcatggattcactctcattgtgtcaataacatggactgccccgccttcatgtgcggtgccgccggaaacaatcgtttcattgatatacggatacaccgtgatttcttcaccaaggtagctggctgcaccaacccagtaagggccgctggtctgcatattaatggacatacctgtcatgtggcggctgcatggtttggcatcgcttatcaggcgctcaagctccagataggtgtcttcggtgataccatgatcctgtacgccaatatccagacggaacgtccccggcgtttcgccggtctgccaccactcattgatgcggatcaggaagccgaacggctctaccacgcgccgcacggcgctggttgtccccttgtgctgatggatataaaaagcgtcctgcacaacgcggcgcttgacgctttctgtccagctctcatcccagcggtcaacagaaaacgcccaggccagataaggcaggaatctgatcgggcaggttgccgggttccacaaatcacgcagcgatacctgcagatcggaaatcccgctgcaggtctgcgccagtcggcgctcaagcggcgacgaacccggcggcaacagactattcatccgtgcccccgttggtaacgctccattcggtacaggatgccgcctgtgtcttatccagcaccacatcctccagaggggacgtcagctccacacgctggacgccctccacgtgcaacgcggcataaatggcgctgcggcggatatcacgtcccagccgcgtctgactggcgatgtacctctgcagactggcttttgccgccaccataacaggctccgcttccggccctggataaagaaaaatggtagcctccacccggtacggtatgatctccgcactacgaaccgtcagacggtcagccaccgggcgtacactctcactgttcagggctttttcaaccacatccagcaggtcttttactgctgtaccgtcaccctcacggctcagcacggtaagtaccacctctgcaggggccggactggttgcgctggcatctgccacacgtccgtccgcacttctggcgtgaaattcataggctcccgtagggccagcaacggacagtccctcaaatgctgcagggatgcgctggcgcagcgcctcatcatcttccatcactgcggtgaccggcggtactgcatcattatcagcaggaactaccgtcagacgtttcacgttgcagttggctgccagctgctcaagatcatttcccatcgaataggccaccatcaccgcctgcgcagcctcgttaatacgctggcgcagcaggatttcgcggtatgtgctttcctgcagcagcttggtgacgggttcagattccagcgccagcgtgcgccgcaccgcgtcctgttcatccacaggataaagagccacaaaagcggccttgcgctcagccagcagcgtctcaaaatccggcacgtccactatctgtggcggcggtaaccgggaaaggtcaatgactgccattgtctgctcctgttgatatggaaagggaaaccggtgctccgttattactatgtcccgtaagctcaaccaccatagagccgtcaaaattgccgttgatggtgatggagtccagcgtaaggcgcggctcccagcggttcagcgccacatagactgcagacataatctgcaggcgcagtgccgggttctgcggctggtcaatcagcgcgaacagcagcgaaccgtattcccgccgggcaatgcggctaccctgcggtgtcagcagaatatcccgcaccgactggcgcagatggtctgtatccgcaagggcctgcccgtcattccggctcataccgatatacagcgtcataccggacctcccgatgtatccccgcctgacttaacgccagtgtgaccgtgtttatccatcacgaccccgttagaactcattgcgccgccgccctgggtaacgccgccgttgatcaccacctcgctgttaatgcgtgttgtgtcagcctccactacaaactcaccggtttttagggtgatattgtccgccgcctcgatcaccatggatttgataccccggacatgccaccgcccggtggcgggttcgtactcaaaccatccaccgtccgggtactccgtcacgcagccgtccacagaatccgacggcggcgcaaactgattggagtagatggcaggcaacgcaaaagcagtttccagattgccgcccatgctcagtaccaccacctgctcatccggcgacgggcaccaccatgtacgggcaccaccggcacgcagcgtcagccagttaatccagttggtttcaagctcgcccactctcacccggcacagccagttttcccggtccacttcggtcacggtgccggtgcggatcaggttggtgataaggcgcataatttcggtcagttgtgcattcataacgaaaggttgccatcagagggaaaaggtaggcagcgcgggcgcttgtgccagcagtggcacaaagatcaccccgccagccagcgcagcagggtgtcgcgggtgacggtttccacttcttcattcacgcccagcaggcggcgctctgcgtagcggacctccgggccttttcggctgacgcgatcccgcaggccgtaatggtgaacacgggcaatgcgctgcaccttgccatcaaactgcacgctggcggagtccgcactggcggtggttttcaggtattttgtggtgcgaagctttgcaaacatctggcgtttgatgcgtcccttcttgctgcgggcagtcacccggcgcggctcatagccgctgccgtcaggattacgctgcagcctgatgttctgctgctgcgtccggcgcagctgttgcgccagttgccgcatcatacggctgcgcgcggcaggctccagattcgccagcagcgccgtcagccagtcatccaccttctgcagctcatccacgtttcaccgtccacatttcttcgggttcgtccggctccggcaccgcttcaacgctcgatacgctgccgtcagtgctgaccagcacacgctcagtcagttgcaggttcatgctgatatcgcacacatcgtttcgcagaatatccacttcaaaggtgaacagtttttcgcgcagatccgggttgttgatggcgtccggctgactggtactgagccacagcaggactggagccatcagcagattctggtcgccgctgaaatcctcgatcaccacgttcagggtgtagcggtattcccatgacatagaactggctcctgttgccaccagtgagccgttatcaacgaaaaggtgcagcttgtccgggttgtcccggacataggcaaccgctttattcagggcgctgcgtaaggactgcggtttgttcactgtctcgctcctgacacgcaataatcgtgtccactttgtcagcacagaccgcccaggcggcctcggtttcatccagcaccgcgttcagatcgccgttactgcgcggcgctgacctttccagacggcactgcgtcactctgggacagccactcacggtaagctgcacctccggcgagggccggacgctcccgcagccggataatgtcagcaggcaaaggagtatcagcccagcggcgcaaatcctcattttcacgtttcagttcctcgatccggtgctggcggctgcgcagaagtgcggtggtctgttccgctgccgcataaagccgcgcctgctcccggctgttggtttcggtcagaatggacaggccgatcagctggctgtttttcttcgtcagctcctgcgttttgcttttcagcaccgcgccctgcgtctcgatggtgtggctggcattgttaagccgccacgactgccagcccagcgccgcaagtaccagcgccagaaccactgccagtaaacgattcattcccgcagtgcctttagctcatcttttattgctaagctcatggctactgtaaaaacacacaccatccccgtgagcttccatccggcaagcaatatgacaaaggcaagagcgagacgctgataccagatgagaggtactttatccattagccccagcaccctgctgagcaactgacggacgcgtagccgatcccccccccgtcagggtgcaggagtacaaaccagcacaacaaaccagtgaaaaagcggcatactcaaaccacataaccagcgccagtgggaaaagcgcatgagatgccgggaaattcacatcaaccatcacaaggagcgccagaaccgagaacggcagccagtaactttttaaccatttcatttcgctatactccttttaagcaccaggtcatttcccgcgcgcggcggttgtccagcccctgattaaacacacctttgacatatacccagcgcggcagctgatggcaggcatccgcccagcgccgctggttcagcaacttaaccagcgtggagctgcaggcgttgccggtgcccacgttgaaagcaaacgacaccaccgcgtcatagaccttttgcggcatcggctgtaccacacatttatccagtgcccgctccacgcgcagcacgttggtgataagtccctgcgccgcctgccgttccgtgatggtttttccaggcaccacaccggacgtattgccgatcccgtcagtccagacgcccgcgctgcactgataaggctgcaggcggcatccctcgtaatcggcgatcagtttcagcccctcaacggaggtatgaagcgactgaaatccgggcagcgtggcggcgatagccagcaccgccacgacaaggcagcgcttaacgattgaaggattcatattccccccgcgaaatcttgccgccacgtaacaatttgaaagactggtgtttgtagtaccagttgatagccagcatcagcacaccaatcagtacgccgccaaccgttgacgcatccttgagcgacagatcgcccagccatgccagcagcacggcgatgcagtaagtgataaaggcgctgattcgttcaagcgtcataattcagtcccatagctggacggtctgcgccgtggttgacgccgtaatgtccggcagctccacctgcagcccgtgcggtaaaaatgggccgtactcagccagccccggatttgcatgcagaacctgctcagtgacaccctgcgtgcgcccgtaatgacgccagcaaagcgcgtccaccgtgtcatactgatgcgcacgcactttcatcagataagctccaccgtacagtgcggtacatcctgcacccggctgatggcccagcgggcatcacgccacagatcgccgctggcctccgccagctcctcccctcgcttcacgcctgacgccgtggcgtcatagtcctgataacgctcattaagcacagcgcgcgcccagcaaaaaacagcgttgtggtagtgccggatacgctcgcttttaccgtccagcatttctgcgggaacctcagcaagtgtccgccagcccagcatctgctgacggttgcggaagtcgtacagctcagcgttaacctcagagatcgccgtcagcacgacctgctttaaacgcggctgcgtcaccgtgccgtcagtgcgcatcacactgcgaaattccgacaggtccacatcaggccagaacggcgtatttttgatgacctccgcctgttccggtgcctgttcgggcgcaacaaacttcatgcggctttctcctgaataagtgggcggtggacggaattttgatgtggcagtgcctttcgccatcccgtgccgcccgtgcgcggggcacgttcgttagcggctgtcattgcgcagtctgcgctccagctgctgcttttcttttttcacaccgcagcggggatcgagctgcagcgcatgggtaaggtgattcagggcagacgccggattgctttcgctcagtacagcgccgatggctttatgcaggcgcgcccgcgactggtccggcatatccagatcagttgtcaggtccagcgtctgcagaagcagatcggcatcaaaaccggcagcggccagcagagcgctttgcgccgcgtctgccatttcttctgccagcacggtctgcacgttacggttgcccagcggcatcacccagccatggcgcagcgcatgacgcccgatttccagcgcaccggcataatcaccggcatcgatacgccacagcatcacgtacatcagcacgtcatcctgctgcgcacctccggcagccagcacgccctccgcccaggcggaatatttcggcagcagctccaccttgatttccgcctttttcaccgtggactggatgcctttaaggcgacggcgatcttctgccagttgcagcagcatcaggtcatagccagacgcatggcggcgaacactgccgccctcacgggcggcctgttcggcctgaatgcgcaggcggtgctgccgtgcgggactcaggctcatgcgttactctccatttcctgactctgcggctacaacaggtgcggcaggcggagtgaaatcactcatttcgatgttttccaccagtgccgcgcagcggtagtcctcgaccacatacgcctcgttaacggattcaaagttttcaatccggtcacgtttcgggttgtcgataacagaacggcggcgggtgtcttcctgccagtagatggacaggttatccagtcgggtgattaacaatgcatttgccgggaagaaaggcgcacgcacagcctgcaggccgcccatacgtttctggctgatgatcatatcggcggcaattttttcgctgttgtcctgctctttgttgaccagcgggaaatacttgtcagacagcagttcacgaccacagacaacaaccagctcatcatcatcctgatactccacatcgatcagctcgttgacggcatccatcaccacagcgtcaaggtttacatacttaccacccggacctacttttaccggctccgcagtagtggtgccgtcttctgcggttttactgcccataacatgatccggcgcgtcttcgcggattttctgtaaccagcctttattgacgtcctgcagcagcgggttttcagcacgatttgaggttttggcgcgcttcacgccgttaaagccgatcatgatgcggtccagcgcctgacgcttgacgatggcgttgcggatacgcacctggaagtcctggaacttggcccacaggtccagttttgcgtaggtcagcaccgtatcaaagttggtctgttcgcatttgtattccacgtcttccatcagcgtcggatcggtaggctcgcgctctttggtggtggtatcggtggttccggcaatggtgctgccaacgcccagccccagcaactgtcctgactgttcagtgaccggcgtgatgttaatcagcgtcaggaaagcggcggactgctggatctggtcttccagcgtctgctgcacggacggctccacggtaaacttgctggagagttcttcaacctccacactgttcaggcgcgccaactgctgcaggtaagcgttaaaggcaaagcgggttttctttttcatcgggttttatgctccatcagcaattggtcagggtgcctgccggtgcgtcaccgcccggcgcgcgctggcggtagtctttacggctgtcttcgctgctaagcttctgctctagctcggcaaaggcggccagctgttcctgcagggaggactccagctcagaaaggcgcttgtcctgttcggacagggatttatcagtgcgctcgctcaggttctgctgctcggaggcgaccagttccacggctttatgcacatcggagaaacgcgcctcatcggtctgctcttttttggtgaacagcgcggtgacgcgggcaaagagggacggcttttcgtcctggacctcttccagttcgatcagcgtttcgacagcttccgaaaacaggttttcagggttctgcttacggtttgccagcggattatgtgcggcgctggcgctgaaagccagcatttcggtgccaaggctcgcaggatcgtccgtcgcacccagccccacaaggtaggctttgccggtgtcggcaaacttcgtgctgacctccatggaggtgaaaagcttctggccttttttcaccagttccaccagggcgtcagtgggttcgatatcggcataaagtgccatcttgcccgccagcgggccgtcctggatttcttctgcaaccagccccgtcaccctgccatagcggttaaaagtgctctccggcagataagacttgatgtgctcaaggttaatcagcgcggtatagaccgtcgggttgtagctggcagccatctgtaccagccattcacgctggatctcgcgcccgtcagtggtggcaccttccaccccgatgcggaaacgctttgctttcactgtcatgagccgtgctccgttagaaataacttactggagccttatgtttgcggtgatagggggagtgagacaacgcgctgtatttgtacggtaaaccacacaaaccgcagccggggaaagccgccatccaaggccgtatgtttgggccatgaacacgacactgacccccgcagacctcgatccccgtaggcaggccatgctgctgtactttcagggataccgcgtagcccgcattgctgaaatgctgggcgaaaaagttgcaaccgttcacagctggaaaaaacgcgacaagtggggcgactatgggccgctggatcagatgcagctcaccaccgccgcacgctactgccagctcattatgaaggagcataaagaagggaaagatttcaaagaaattgacctgctggcgcgccagtcggagcgccacgcgcggatcggcaagtttaacaatggtggcaacgaagccgacttaaaccctaacgtcgccaaccgcaacaaaggcccacgccgtcagccggaaaagaatgttttcactgatgaacagatcgaaaagctggaagaagtcttccacgcctctatgttcgactatcagcgtcactggtttgaagccgggaaaacaaaccgcatccgcaacctgctcaagtcgcgccagattggtgccacgttttattttgcccgtgaagcattgattgacgccctgctgaccggacgcaaccagattttcctttctgccagtaaggcccaggcacacgtctttaagcagtacatcatcgactttgcaaaagaggttgatgtggagctgaaaggcgatccgatggtgctgcccaatggcgcagccttgtactttctcggcaccaacgcccgcacggcgcagagttaccacggcaacctgtaccttgatgagtatttctggataccgaaattccaggagctgcgcaaggttgcctccgggatggccattcacaagaaatggcgacaaacctacttttccacgccgtccagcctgacgcacagcgcgtatccgttctggtccggcgcgctgtttaaccggggccgagccaaagcggacaaggtggatattgacctgacccacagcaaccttgcgcgcggcctgctctgccctgacggacagtaccgccagatcgtcaccgtggaagatgcggtgcgcggcggctgtaacctgttcgacctcgaccagctgcgcatggagtacagcccggacgaataccagaacctgctgatgtgcgaatttattgacgatctggcgtcagtattcccgctcagcgagctgcaggcgtgcatggtggacagctgggaagtctggaccgattttcaggcactggcgctgcgcccgtttggctggcgagaagtctggatcggttacgacccggcgaaaggtacgcagaacggtgacagcgcaggctgcgtggttatggcaccaccaactgtaccgggcgggaagttccgcattctggagcgtcatcagtggcgcgggatggactttcgcgcccaggcggacgctatcaaaaagctaacgcagcagtacaacgtgacctatatcggcatcgactcgaccggcgtcgggcacggtgtttatgagaacgtaaaagcgttctttcctgccgtgcgggagtttgtctacaaccctaacgtcaaaaatgccctggtgctcaaggcgtacgacattatcagccaccgccgtctggagtttgacgccgggcacaccgacattgcgcagtcctttatggctatccgccgcgccaccaccgccagcggcaaccgtccaacctatgaagccagccgcagcgaagaggccagccacgcagatttggcctgggcaacgatgcacgcactgtttaacgaaccgctgcagggcgaatccgccaataccagcaacattgtggagattttttgatgagtgaactcgaagccttaaccagctcaacgccaacagaagctacggtgcctaaaaacgcaggcgtaactgccgaggctttcagctttggtgacccgatcccggtgctggaccgccgcgagctgctggactatgtggaatgcgtacagatggacagatggtatgagccgccagtaagctttgacgggctggcgcgaacctatcgcgccgccgtgcatcacagctcaccgatagcagtgaaacgcaacattctgaccagcacctttatcccgcatccactcctgagccagcaggcgttcagccggtttgtgcaggactatctggtatttggtaacgcctatctggagaaacggaccaaccggctcggcggcattctgtcgctggagccatcactggcgaaatacacccgccgtgggatcgatttagacacctactggtttgtgcaatacggcatgacaacgcagccctacgagttcaccaaaggcagcatctttcacctgatggagccggatttaaaccaggagatttacggcctgccggaatacctgtctgccatcccttccgccctactgaacgagtccgctacgctgttccgtcggaagtattacatcaacggcagccacgcgggttttatcatgtacatgaccgacgccgcacagaaccaggaggacgtgaacaacatccgccaggcgatgaaaagcgctaagggccctggcaattttcgaaatctctttatgtactcgcccaacggcaaaaaggacgggattcagatcatcccgctgtcagaggtggcggcaaaggatgaatttctgaatatcaagaacgtaagccgtgatgacatgatggcggcgcaccgcgtaccgccgcagatgatgggcatcatccccaataataccggcggctttggcgatgtagaaaaggccagccgcgtatttgtgcgcaatgaattgatacctttgcaggagcgaatgaaagaaattaatgaatggatagggcatgaggtcattaaattcaaagcatacattcttgaagtaatataaatatagaaagagtgcctttaacaaaggcactcacctcataatatatccagcgctaaagataactagaaaccaatatcttatgaaactaaatcttggcaagcatctcgtctaaaatcgcttgccttttcattctatcatccgtaatgtcatcgatcgacaaaacaatatcgacagctctttgaaaggttgcctttattttatctccatgttttgtcatctcagttataattttattacaataaatatccattttctttgagccaaactttggaatgtcctttccagcaattaacacgcaaacaacagccattagatgccatttatacttcctaatgttttgtgggatatctgcattcgatgtaagcaagtgaagtctatataacgttagacatgccgcataaaatacaatttctttcgtgtcattagaaaatattttctcagccagtaattcgtacattcgctttgggtatctgtatgaaagatctggccgacggaaaaacatagctgcgacacatttagccgccatatgaactgaaaacacccttactgcaggtatatctctaccgataaattgtctttcacgtctttctaaatataagcggccgtcttgtccttcatatgtgtcaaagtacgcttcgacttttttaattattggacgaagagaatagaattgtgtttcgtcaactttagtttggctgttagtggcacgaactagttctgaaaaaacatcttcattcaatgtttcaacaaccttcaaattaaccatcatagtatcatctaatgaatcacggcactcataaagtacgttagatgtttgacaaccgttgactatttgaaaattttccaaatgcaatatactgccttgaagctttacatctgggcttactatggtaatcccattattaagaacaggaaatcttgaggccgcatctctatctttaattgtctcagcaatcgacgcattaacagggttgtctattcccaagaaagctcggacgttctcaacaaaaacatgattacgaagagaaccctcctccgtcattaaaagattactaacaaaatcctttgcttttacaaccgcaagataagcctcttcgatcccattaatttttggtagaggagcattactaaacaatggcaattcagcattaaccacagagtatgtatcaatccaagtcctagttaattcatcacgatctacaaactcaacactaacattacaaaaataacctaattcttcgatttcttttataaaaagttttcgcgcggactctaactctctagggctcttatatattcctgtggcaacatatttagcggtaaaacttgggcggccgcctcttatcttaggaacattttttatcaccacgtcaaatacttcatgtgcatttttttggatatcatctaaacaagagtatggagactcatcaatgaatctaaaaacagatgctttaaattttaaaaaatcgcctaaatcaaatgattcgctacgctttgattgtataaaaacgatatcgacatcgtgatttttacgttgagaggaaaaaatagaagacgcatcttccggagagatgcataactcttcgtcaattatgatagcaataccatccatgccatcatcaccagctccggtcgttacatcatctatttcaaaatccatactgattcgagaagatagcatggctttgttacagaacaactcgaactgcacatcctcttcatgattttcaataccgtaactctttacgaagctatcaagatgagccttaacaattctatgcatgagacatccctttgcgaaatgacgaatttttcttatcgtaccacttgatttcatcttttgacatgcttgcgcgcgctcgtatccccgccacgcctgcccgctttatgtagtggttttcatgcacctgcatgatctacgcaaaagcccgccagaactggcgggccttaacacaaaagatcctcaaacgatcatgcgatctcatgcagcatagacatgcgcgtttatgcagaatgtgcaaaatcgtaacatagtccgtaagcgtgaaacctagaacgtgacagccttgtcaaagccagaaataattgtataagaaatagacgagttatcagccttgttcactttgaacttggcacctttgtaagcgataacatcacttcccttagaatctacagaaaaatctgttgtaaatgctgcacgagccatatcgtttgcaaattcacgataggtgaacttcattacaccgcctgcatttccattgtattcgatagtcttaaccaatgagttactcactcgacacagtccatcaggaacacgtttgatagaaatttctgatgcagaataagaagtgccatttggcggtgatatctcattttttgcagcatcgtaactaacataatcaacatagttaccgatttgcccatagagattttttaacgcaacagcttgagggttatgataattgcggtaaattccattcccctcactgcaatatgtaccagcagcgatagaagacaatgcaccattagccgcaccaagttctagtacgtccgttttaaatccagtagcagatgtgataatgggatcgcccatgtaggcggtagcactttgcccaatagcaggcttcaccacttcaatagcagtgatatttcggttagaagcatgtggcacgcaaccagttaggattacagcaagagatattgttaacgctacattattaattttcatttttagcctattattcttttcttgacgaaaaacaaggcgatatctgattgacatcgcctctcactcatatgtaaccctttttgattagtaaaaacaagcgtctattgacaaaatcaatgtagccagctgtcgtcttcccacaccttctgcataattttcatcacttgttttctttcttcatccagttgcaatccggtcagttccacaccgttagagctacctttgcggatacgaattaccgttttgggatacagggggcgcagattgcggtaaagctcggattcaagggcgtccagggtagactggctaatcttctgctctttatcgatcattatttcaatgcgcataaaagtcacctcaattgatgacatccattgagcggttgtattcgtgggttctgatttttgccatgagttcatctgtcagttcagaaacccactgcagggccagccccttctcttcatcactacactcactagccgctacaagcttaagaaaaaaatcaatgcgctggagcttcaaagactccaaaaaatagtcctgcatctttcctcctatgacaccacaagcaatactgtacatataaccactgtttatatttacagtatataataatcttactgatgtaaaacgttttttacgttcatcagcctgatatgcctggtattattaagagcacgaattgttaacccgcgtaattaatactggttccgccacttatcatcttccttcagacgctggttccgatagaagatacgcaggcctgctcctgatggaatactgccaccgcgaaggagcaaatcgacttctttctcgctgccatcaaatcctctggacttcagttcatagacgagctgctgatgctgatgatctgtaattcgctgtttgtagtctttacgccttttcggtttaaccaggcgcaaccttgctgccagctcccggcgatcttttttgctcatactgtacaggtaatcgtgcaattccttgtcatccatgcgggtaatgtccgttctggtgcccccatcagctgatttatctttctcctgttggttcaaattttcagcaaggggacagttattgccacgagtccaaggggcgcaagcgccctggtcggctgccgcctcctgaacgtcaacggccttacgaacctttttccacttcatcgcgtgcgtgcaaatcttgccctctgcaatcggggaccagatgccatagatacggataccgtgatcgccgtaggcgctcggttcgtcgttaagctcataagctgtgcggacaaggtgatgtttgcggggaaccagtacaccgccctgtttcatgatgtaggtggcaaagcaacctgcatccgcagctgccagtaccgcatccagacgcggattatccagtaccggcgcacccgctttgcgttcgccttgtactctcgccgcctgacctgccagcaagcgcagctcgcggtatgcctgacgccccggaataccaaagaaacgaaattgctggacacggtgcagcgacgcccaggcgctgacatgctcggcgctatcacgcagtggtctgccggtttctttgctgatttctttagccagcccgcgcccgtcgatgttcttactgatgtatttggcgatgtagcttgtcggcgtgcccttgcgcgggttgattagctcggacttgaagcgcggcccggtattggtgcccagctcctcgcggtcttcacggatggcaaacttacgcagcagcgcggtgatggaacgacggtcttttttgcgcataaagcacagaagatgccagtgcacggtgccgtcatggtgcggctctgcaacgcggacgccgtaccagcgcagcccggtcttgtgcatggccttgcggaaagcggcgaatgtatcaaccagatagtcactgctctgccggaccgtggcactggtccacttcggattaggcctgccgttgttgagagttgcgtggaagcgtgacgggcaggtgatggtataaaacaccgcgcagtctccgcgcatttccgcgatcagctccagccccttaacacaggccatcatttcattacggcggtgcgccgggttgctgttgctggcgttcaccacgtcttccatgtccagcgtgtcgccgtcttcgttgatcagctcatgcgagcggaagaactccagcgatttgcggcgctgctcgcgtttgtggatcacggcttcgtagctgacatacggtgaggctttcttgttgaccaggcagacggcgcgcaactgctcctcccgccactcgcagcgcatctgccacaatttgcgacaccaccagtccgcgcacagcatacgggccagcgacggtgggatcagttcataaggcaccggcttacggcggcgctttttgcggcgcaactgctcaaaggctggcggaatgacctcaaggcgcatggcttctgcagcaaccctttcccatgcctggcggatttcttctggtttaacatcgtcactgacaaacagatcaccgcaggccgcatcaagacacatgctcatatgtgccgcaaccagcgtggataggcgtttgacctgatcctgattcatttcagggagtaccagcagcccctccagcccgtcgtggctcgccatgaaccggaaagacgcagacacctggctgtcacgcacgcgctccagccgctcaagacacggcctgattgtttcgcgcaggtagcgggaataagcttttgctctgcccaggctatggaaatatttaatccgttcaagtagcggcttgctgatatgcgccggttgggcgcccacgtcggcaataatgaccagatcgggattaaaacgttgctgctcacgcgccgttttggcatggctaatcagccgatcctgctctatttcacgctggacaggatcacgggattcattgaagaaatagcgttcccagacctcatcgctcagcgtctcacggcgcaactgctcctgctcgttatccgcagcgtaaagagcgatcaggtttgaaagcgcagactccggcgcaacttccgctgggtccagatacgggttaaccgctttttttggggtattccatggaaagaccacggcggcctcattcgaaccgccggtggttggtgcattatgtaatgtgaatttactcactgccacgcccgcacctcagtttctaccgagatatcaggaccagacgccaaatcaacaccaaaccagcatgctgattttgtggcgatgatttctactgcagttttactatcaccggcagccacgcccatgctgcgcttagcggttatacgatggcgagtaaaatcacgataaagcgaacgggtcagagacgtatcgctgttggacacgataaccggatgaccttctgatgaccggcgttcaagaatagacgccagatggaactgatcattctctgtaaaaccagctgtgtgatatccgttaaacgtgccgtcatatggtggatcgcaatagacaacatcacccgtttgcagcagtgccagtgtctcgtcatagctggcgcagataaacgttgcgcgttttgctttttctgcaaatgcacgtatttcgttttcagggaagtacggctttttataattaccgtaaggaacattaaaataaccgtccaagttatagcgacacagtccgcgataaccatggcgatttaaatataagaaatacaatgcccgttcaattgcgccaccatggcgcaagttaaactcctgtctcgtcttataatatgcctctggatcattacgggcttcaaaaagatatctgccctctttgatgaagtattcaacatcattcttaatcacctgatagagattaatcaggtctggattaatatccgcgacaagataatgaggatagtctgtctctatcatcacagcgcatgaacccgcgaaaggttcaaccagtcgcgggccttctgggaggtgttttttcagttctgccatgatggcggttttattacccgcccatttcaggatggtgctcatacagcacctccgttgtagtgtttgcctttcagctctgcgatttcctgacaggtgatgcagcactgcacgcccggaatggcgcggcggcgtgctggcgggatcggtgcatcgcaatcaatgcagagaacacgggaaacgcccggcgttttattgcgggcggtatggatgtggcgctggcgttcttcttcaacgcgctgctgtacgaggtccattgaatcagccatcagtggatctcctgcgcttcgttctgaatcttcaccgcttcttgacgcagcagctcagccgcttccgtgtggttaagctgacgtgacacgatatgggcagccaaagagtccagacgtgctgccatcaaatcagcgcgtccacggcgttcttccatgcgcgcatcagtcagcagctgattaaggccagcatcatctggtccggttttagtgatacgggtttcaatatttcgcattgttgtttctcctgaatttgggcaataagaagcccggcgggtttacgccattaatttctgttgtgggttaattcggcatagttagccgttttggaaataagctcaccactgcacgaaaatgattcattgctttaatcagttcccgcttttcgtcagtagtcagatcactaatattgacgctatgacgttctgctggaatctttgccatatagaatatggctgccagtgccctctcattttgtttattgttaacatccctttggtcgcgcatatcttcaatgaacctttcaagctccgactcaatattcaggccgaacacttttgcgcgtaattcagcaatatgattcaacccatccaggcgtttgccggggcttagtggaactgtcgccaccgggccatcaatagccattctccctcctatctcgtcgtacatatacctatttgaagttgtgccgggaattttttcacacgcccggcgcgtgccttagtggtagactatttgcgccaacaatcacctacccctcgaaggagaaacctgatgtcagactctgacaacttccatgtattgcctcgtcctgcccctgcacctaagccagaaccggggcaagataaaaaataggaatccggcatgactaaacaaagctccgaatatttccagttgcattactgctattaccttgagcttatgacagcgacacttcacggtagggctgacaaattgatgactgctattcagattattagcggtactgctgtcatagccgataccgggctggaatgggtattcgctttgcccgttgttgtaatcgcaacaattcaacttgtgtggcaacccgcaattatttccgagcgtgctagcgtacaaagccgtcagtacggtgaattgctttatgctggggatgaattgaccccggaactgattgcacaaaaattgaaaacactgcatcactctgattccgcacctttcggttctttgttaaatccagcctacaaaagagcagctattgcatgtggtcggtctgacgacactaagctcagcttccaggaaaagcttttcgcctggtttgcaggatgcctgccacgttaaaacttagacgttgtagcaatctctttttacctattccccggacagcctgctgccggggagacagttcaatacatggatgccacttttttccgcaaggtaaataaatccagccgtgaccgtagtgcattgctgggctttgcttaacgagaagtgatgcaaaagatggttctctagtcagcatagccacctcagatcagaccgaatgaagcgccgaggcccgtcacggtatccaccgcgcttgccatcgccgggttagcctgcaaacgtgcctgtatggaaacggcagccagtgccattaagcgagtaacagagttgatgctactgataacatcgcggcggcctgcagtagttttcacatcacccgatacagcaccggcagcaatacgtccgatttcagcagtagcgctcatgacataatgtggcagcttctcttttgccacttcgttcatcggtacgcatggcaggcagtgaatctgagccaaaaaaccgtcaacgagcgtagagtcctcagtaagatcggtaagcagccagatctccgacggcgtgagctgatgcggttgttccgggttcagcttgttacgcagcgtctggactttcattcccgcgcgttctgccagcttcgccatgttgtgacgcagcgcgaaaacccggcaggcttcgtcaaagtgtggatgtttggaaatcttataatcaaacatgcaagccccttagaaagttctcataatcgaacttactaaccaacaatgacgcggaagttggaatgaccaagagactcacgaacctggtcggttttgtacatcaggtaccgcaggcttacacgtcctttatttttttctttcttcaccatgtacttagcaagctgaccatggtgaattttttgatacacagagccacgggagataccttcccactccgcgaactcagcaggcgttgccatctcttttggtacacgaattgaaatatcagtactcatagtgcagtatctcttagtttgggttcgttttatcttgttttatgtggtttggttttgcttttcaaaccatgaatggatattaagatcactttttatatacgtcaagaggtttgattatgagtttaatcaaggcggggaatgatagtggtgggcgcgatgcgattaacaggcttattaaggcttacaatttcagctcacgacagcagctctgcgaacatctggaagtatcaaaaagcactatggctaacagatacttaagggatagtttccctgctgaatgggtaattcaatgcgctcttgaaacaggaatttcccttctatggctggctacgggacaaggagatatgtatgcgtgtgagaacgaagaaagaaatctcaaaaacgaaacctccgtcacggtaagaccactttctaaaattgttgctcctagcatcaaacatgttgaactgaagaacggtgaactgcagccaagtgatgaaattcttcttgatagcagactgctcgatggtgactcatccaactctttatttgtaaaaacagctactgatagctttgttgtggatacgtctgttaaacaagtcagtaatggcttctggttagtcgatatggacggagttaaaagcatcgtcaaaatcgctcgcgttccaggcaacaaaattgtagttcaccaagatgaaacatcatttgaatgctcggtcgacgacattgaagctatcgggcgtgcagtcaaagtaatcaagagcctctaacttatgagcatcagaaaacagcctaacggaaaatggttgtgtgaatgctacccgaacggacgggatggcaaacgtgtacgcaagcaatttgcgactaaaggcgaggccatagcattcgaaaaccacaccatggatgaggtgaacaaaaaaccgtggctgggggagaaggaagatcggcggcatttgtcagaagtgattgatcagtggcattcactttatgggcagacgctggcagaccccaaacgcctgatggcaaaactcagcattatttgtaatggcttgggcgatcccattgcctcagagttaaccgcaggcgattttacgaaatacagggaggcacggttaaaaggcgaagtaaaaaatgaagatggcgtgcttatgtcgccagttaagccccgtacggtaaaccttgaacaacgtaacctatcatctgtttttggcacactgaaaaagctgggccactggtcagcacccaacccgctcgctgggctgccaacattcaaaatcgcagagggcgaactggcgttcctggcaccggaagaaattaaacgtctactggatgcctgtgctgattctcagagtcccagtttgctgatgattgcaaaagtatgcctggcaactggcgcccgatggagtgaagctgaaaacctgcagggccatcagctatcaaaataccgcatcacttataccaagacgaagggcaagaaaaaccgtaccgtgccaatatctcaggatctgtatgacgaactccccaaaaacagagggaagctattcacgccatgcagaaaagcttttgagcgtgcagtaaaaagagctggtattgagctaccagaaggccaatgcacccacgtgctgcgccataccttcgccagccactttatgatgaacggcggaaacatactggtactgcgcgatattctgggccacgcagatataaaaatgacgatggtttacgctcactttgcccctgaccacctcgaagacgcagtgacgaaaaacccgcttcacaacctcaattggaaacgctaatttatggcggcattttggcggcagggcactaaaaacgcgtaaaacggacgaacactgaataatattaacccgctgtttttaaacgcaatacactgtttttactatactaaaaatggtatgtaggaatttcggacgcgggttcaactcccgccagctccaccaaacattcattcatgatgcatcatgaaccttaaaaaagcctgtaacttcaatgagttgcaggcttttttgttgcatgtgtggtcatgatctctgtatgaatcttgagcttttggcaccatgtttagcaccacggtatcgtggggctaaaaaagcgtggtgctaaaacatgcctaaccaactgaaacccttaacaaatgtggagatcgctggcgcgaagccccgtagcacagactatgagctacgggacggtgaaggcctgtacttgctggttaagacttcagggaggaaggcctggcatttcgagtattatcatcccgtcaccaaaaagcgcaccaaaaccagccttggcccttacccggtcgttacactggccatggctcgcgaaactcgcacgaaatacagacgactgctctatcagggcatcgatccccgtcaacacttagcaggaatagctgaagaaaaacgcatccagaatgaatgcacgctggaaaaagttgcggaacagtggctcaaagagaagaaacggaccagcgatcttagcgaagatcacgccaaagatgtctggcgctcgctggagatgcacgtcttcccctctctgggtaacacacccgttaccgagatccgcccgaagatgctcaaggaacacctcaccccgctggaagaacagggcatcctcgaaacgctgcggcgagtcatctcacggcttaatgaaatcttccgttttgccatctccgaagagctcatcgaattcaatccggctgacaacctggtcgcccgcttcaagaaaccaaaaaagcagaacatgcccgcccttcaccccagtgaactgggcaggctaatgctggcgctacagaacgcttctatccgcaaggaaacccgctgccttatcgaatgggagctactgacctgggttcgccccggcgaggccgtcagcgcccgctggtgcgacatcgacatgaaaaaagcagaatggcgcatccccgatacctttatgaagatgaaccgttcgcacacggtgccgcttagcaaacaggcgctgcgcgttcttcagatcatggagcccgtcagccgccatcgtccgtgggtcttccccagcatccgcaaaccactggagcatatgcaccagcagaccgcgaacgccgcgcttatccgcatggggttcggcggcgaactggtcgcccacggcatgcgcagccgccaggaccgcaggcgcaggtcattttccccgtgaagtcctggaatctgtgctggcacaccagaaagaagacgagatcgaagcggcctacaaccgcagcgactatctggaacaaaggcgaccgctgatgcagtggtggggaaactacgttgatgccgccagacggcaggcgctgctcggtgcagaagaaccgctgcaaatcgtggaaggagaataatgtgaccagtcccattcgtcagaatctgtttgaacgggaatgtgatatgccgcttctggaagcgcggcatctcgcccttctgcttctaggcctcgatgcttcccaacctgcaaacgccctgccggaagaacatcaggaaaactaccgtatcctgcacgacgccatcagccggaccattaaggcaacaggcatggtcagtgccccggcgaacaagcgcatgttctatgccgatgagatgtttgccctggcctggcggcttattgatgacgaactgacgccgtcagaagtaaaagaccgtagcctgaaggcggtgatgaaactgtcgcgtaatagccgtggccgcaagtggctgaagacgctcggcgacgacgcactaccggatctcacggcttcaacacaaccttccctgcgtggaatgcataagcgcgacaaagcacgggagaatactgcccgactctgctggctgctggttcagcttctggttgaggagactgatgggcgttatgggacgtcggataaaccggcttctgaccagatacttcgaaagctgaagacgctggctaaggaacaggaattgccgtcggatgggcttggacgggggacattttatgaggtgttgaagatggaaagagaaaagtgagtataggtaattgatatctgtgtaagatgcagcgaaccgaataaaatctgaaagctcagacgtatagtctgcttcgtcctgtgagttcaataggttgatgcaacgctatccttaatcaagggggacgttgcttgtgtaacatttaatctacggatattggtcattaatgcgggttgatgttgtactgtcatgattgagcgacctcaggttgagggtggggctcacttatatacgtgtatccattattagtaggtaaattcatgtatattggctacctaatttagccactcctccgcacatagttaactcctgatttgagatagagagggattatgatgctaggaagatttattgcttagcatatagcaggtgatcttttacctactggagtggtaaattacccctatttttcagtgaatgttttgtcagggagtattaatttcgtggaaaacgataaggtgaagttaggaagaaatgataaatgctggtgcaaatcaggacttaagtataaaaaatgccatctcgatcgagaccgtgaaatgccggtatctaaagccgaagccctgaaattttcaaagtctaattcgcagagaaaggcgtgttatgcaccagcatccatgcacgaagattgtgacaaacgtatcgttcaggcgcacacgctttctaagagcagtagccttaaggcgatcgccgactctagtaatcatgttatgggagtggtaatgaacctgccgagcctgataaaaaacaacggaagatgggttccagagaagattggtatcaatcaggcatccacttttaccggattttgtgcagttcatgacagaatattattttcatgtctagagaacgaaaaatttacaggcacggatgagcagtgttttgccctaatgtttcgttcgttatctaaagaaatttacgccaaggaggggggaagacggtcttccgattttgctaaaaatgccgataaaggaaagttacaggccgaacaagtctatattcaggaatttgtcagcctgcatcaaagcggtttgaatgcagcaataactgaactaaataatcttaaaactagcctcgaccgcattctgcttaacagacagttttcagaaattgaaagtgttgtcttcacgttttcagaaccattacccattgcggtttcgtcaattctttcaccggagagggattttgatgggaccaaaattcaggatttgaacgatcttaccgtgtcggcggaacaggtctgcttcaatgctttttccagcgaaggtaagggatatgtagtgttcagttggctgggaacttcagcaattatcagacgttttgtgcgatcactaattaaggttcaaactgacaggattttcaacaccctcctgtattttttcttcacaaaagctgaaaatacatactcatctcctgagtggtgggacagcctcagtgacaaacagcgagagaatatcggcaatatgattatgtcgggtgttgacttttttgataattctacattacgcgtcgatcattcagttgattataactctgctgcgcttgcagagataagatacagcaacagcgagatttccagttgaatgctttaatgccattagaaaaaacgggccaatcagttgtaccgaaattgtaacgataagatgtcaccgccttttgctgccagatcggcatctttcgacaaactgatgtaggctgctgatttccgcttaagcggaggttatcaggttagggatgctatctgcagataggctatagtaactgggtactctccccaattgtaattgacctgctctccgttaatgaacaggtcacaatcgttgtaatgcggccattaggagtttccatcgtagtattttatccagtcacaatcggagtaaaaaataaacatatattctatcaattcactcattaaatttaatctagcctacatacaccagctggttttattttttcagtaatgaaaattaacatatcgatttcattcttcttagggactaacatcgaaaccccatgtacaagactatttctaacctcagtaatttttttaataaaagttgcatcttgcctagaaattattttgttttttactaaagcattgactactttccctataaaaagagggcgattaggttgtttagccgaaaaaaccttatgccttgcaattttttcaaaattaatccaagcagagatgaaacaagtaaagccagatacaaacatatattcttcatgatcaatgtctggcaggtgcccaacaactgaacgaatcatgtcatctggtaagttgaaaagttcacgttcaagatctttcgctacaataactccagtatcaattaagttaaaatcactttgcaaaacaattaattccttgtgcaactgcggtaaggaacccttatatttatcatttaagacaaagtaatattttttaataggacatatatcatgccagtaatcccttaacccttcaaaatcatcttttattttattaacagcagctagtacattattagatgcatcttctggtgcatacacctgataatataccccctgccccttaataaaaccatcattctttctgtctccaatatttccataaggcttcacctgctgaaaatctggcgacttatagtacattatttttgaaaacaagtcctcaaagcgaactccgtcagactcatagacttggagatgaaacatgtttctagcaatagataatgagatatcatccatagtcaaaccttgcataattagagtaaattcaacaacatttacttatctaagttatatgaaacttggcgttaccacaataacagaaaatattaaattgttagttcttctgactgcccctgttgattaacacaccgcaacttaagtaatgccatcatcagtggttagaacagttaacagcttcctcgcttacaactgacgatgagatagcggcagctattgtgaagtgtttgtagtcgtgcgttgccattcgttaaccatagcaaatattatctcgacggagctcaactggataaaaaccatttattttcaataaattaatctaacaccatcagttttgatggcaaagaaaatcttcccggactctttactttctatccggacttaactttttcacccggacctatacctcccctccccgttccgcgctataaccgcctcgacactctgttcccgtgaggtgcaatcatgaaaatccgtgctgacagtaacgatgcttttcccgaaagcggcaacgtgcgtatgcggcaggtggtccagtttctggcgatgagtgaatcatcggtttaccgcctgattaaagacaccgactttccccgccccgtccacctctcttcccgactggtggtcttcgatgctgcggaaatccgtcagtggcaacagcgccgcaccgtcatccgttaatccacgctcagggatgagccgactgataccccatcatgaaacgcgcgccctttctctgtaagcagtctccggaccgcacgctcgaagtggtgatccttgccggaagcctggcatgggaaacctcacgcgtgtggcgaaaagatcccgaccgggaagatgatgttcctccgatggtactcggcccgaatgaactggccgatctgagcaatctgaccattatcaggcccgacacgctctacgtccgggtacttcgcaccggcgatatcagtgaagaagatctgctgaaaattgccgtaaaactggcgcacgcgggtgtgcagatggcccggctgatgagccctgacggtgagttactggagaactggaccgggcagcttgaacgcctgcgacaggaaaggccttccgatatcctgccggatcacttccgcctcgatgaagaggcgctgtggtttgacaagctcaccgaacggcgcgacggcgaaagcgacgtccagccccagcgcatctgttcccctctgcgcgtcaccgccatcacctgcgacagccatgacggcagctatggccgactgctggaatggcacaccaccaccgggcagttgcggcgctgggccatgccgatggcgatgctcagcggcaacggcgaggagctgcggcgcatcctgctggagaacggtctgaccaatatctccacccgccccgccctgcgcagcctgctgtgcgaatacatctcacggtcactccccggacgccgggtcacctgcgtggagaaaaccggctggcacaacggggtatacgtgctcccggatgaagttatcggtcccgatggcgacaatgtcatccttcagggcagccactacctgactggtggctttgcgcaggcagggacgctggcagagtggcaggagcaggtcgccgcactctgtgcaggcaactcgcgtctggtctttgccgtctgctgtgcgctggccgccccgctgttgcgcctgaccggaacgggtggcgggggtttccacctgcgcggtgagtccaccgatggcaagaccacggtgatgaaagtggccgcttccgtctgcggtggcacggattactggcactcctggcgggccaccgggaatgcgctggagggaattgccagtcgccacaatgatgccctgctgccgctcgatgaactgcgcgaagtggatccgcgtgaagccgggatgattgcctatatgctggcaaacggccagggcaaggggcgcgcccgcaccgacggcgaggtacgcaaccgcaggcactggacgctgctgctgttctccaccggggagctgtcgctggcggaacacaccgaacgcgccggggagcgtatctacgccgggatggacgtgcgcatggtacaaatccccagcgacaccgggcagcatggcgcgtttgagcaactacacggctttgccagcggccagcagttcgccgataccctctgcgacagggtggcccgctttcacggcaccgcctttcgtgcctggctggccttcctcacccacgaccaagacgccagcaccacgctagcgagagagttacttcgccgctaccagaacgccctgatgccggacaacgctggaaaccaggtgcagcgcatcgtggcccgttttgccctgctggcggcggccggagagatagcgacgctgcacggcatcacgggctggcagaaaggcacggcgtatgaggcggtgcagatctgcctgcacgcctggctgaacgagcgcggccatattgccaaccaggaagatgaaggcgtgctggcgcagatcaaacggtttatcaccgcgcaccagtacagccgctttgcctcgtgggatggcccggaccgcccgctgaatatggcaggctttcgccgggtggaaaaagatccgctgacgggcgaggaacacacactgttcttcatcctgccggagggctggcgggaaatatgccggggattcagtcccgccagggcggccagattatgccaggaagcagaatgcctgcagcccggcagcgacgggaaataccagtcgcaggttcgcctgccggagatcggcaaaaccagggtttaccggcttacctcccgcatcctcagtatctgagtgcagtctaacgtgtcttaaaaaaaggtggtacagggtgggacaagtggtacacgcagagctggcgagggttacagcgtcccaccttagagaatttgattaaaaaaaagtggtacagggtgggacagccgttgctaaatctgtcccacttttccgactggcatttttcaggtggtacagcgcaaagccacggctggcgcggttgtaccacttgtcccacctgtaccacctcaaaaacagaatgaatgaaaatggcgaaaagggagtgaaaaggcaaaggctgaaaggaagggagaagaaggggaacggacttgcccgaaaaattccgaaacataaacaacatacgaagttgaagcaataacaacaacgtacatttcaagcgcttagaagcgagatttcacgttacagtaacaatttaatatattgatatcattaactattccccttatcttatattcataatataatcattgctaacattaataaaaagtcgagaactgcaatggaactcagaagaatatctgtaaataatttgttcggaattttaaactatgatattgatttagggaactcagaaacaattattattaccggaccaaatggttacggaaaaaccatgcttttaaagataattgacaacattttaaataaaaatatagattttttctttgatttgcgatttgaagaaataaaatttgaacttgacaccatattactatgtatagagaaacaaaaaaataagaatgttgcagttacggtagtcgattatgtaaacgataaaaaacgacaggaagtattcactctaaataaaaacaaagaacttgacgtcgattattttgatgaaatatataataaactattaatctgtgacaacatagattctgatcctatactaaaatcttacaatcatgaggaaatattaaattactataaaattaaaaaaataaaacttcataaagaaaagcatcataaaagtgatttcttggataaatccattcctaatgcagagttaacttttatcaaagcgcaaaggatagagaatataaaaaatgaaaaatcagcaatcgagtcacaagcaaatttccttcttgagttgataaaaagagctgctgaggaatcagcacaaataagccaaagacttgactccacatttccagcaagattatttgatagcattaacgaaaatatatcttcaacttctatcaatgacagattgataggcattcagagaaaaagagaactttttatgaagttcgggataataaagtctgaagatacttttatccctagaaaattcagcaatgcaacattaggaaaagagtactcaaccgttttaaatctgtatatttcagatgctttagaaaaactatcaccttatgaagaattatttgaaaaaataaatttatttgttaatttattgaacgaaaaaatgcttgcatttaaagaaatcaagatcagtaacgagcatggattttattttcaaagtgataatggagaaagaatatcattaagtaacttatcttcaggtgagcaaaaccaaatagtcatctattttgatcttatattcaaagctaaacaaaattcagtaattcttattgatgaaccagaaatctctttacatgttgcttggcaaaaagaatttcttgattcaatagcaagaatacaaaaacttaatgagttctctaaaataattattgctacacactcgcctcaaatagttaataataattgggatataacttacgatttattcgagaataacaataaaaacatggagggacaatgaacagcctccgtgatatcaccggtgtttcagactggatatctggaatgcttttgctttttagatcaccaaaatatagcaggaagatttttttcactctagaaggagaaagtgatattagatttcttaatactcattttgcagatgagagaatccattatgattcgccgtgtagtggtaaaccagaagtaataaatgctgtgcaattattgcgctctcatggaaaacaaaacgtatatggtttatgcgatgctgactttgatattttagaaggtaacagctacgaaaacattcattttacggactgtcacgatctcgaaatgatgttaatagaaggtggttcatttgacaaatttatttctgagttcttaaagacaagtatacttagaatacatactcttgaagatatacgaaataatcttaaagaatctataattgacgtgacttacaaaataggaatactaaaatggcttaatttcaaaaataatttattgttaatgtttaaaggaatgaaatacgataacttcataacctttgtggactttagtgcgaatatagacatagataattacattcagcacatcctcgacagaagtcctcgaaaacctccacactgtgatttcaattttttgaaaaaagagtaccaattactttataacaaacaagcagattataaatatgtttgcaatggacatgactttacgtatatcaccatgatggcctttcactcagaattttcccgtgataagaatataactcaagaaaaagttgaatcacatttaagaatagcatactcagcaactgcatttcaaagaacaaatatttataacgaactttcgggcttaatagatagccataatatttaataaattacattcaaaaaaaaatagcgaaatacaccgtttcaataccgaaatggtgtatttttcagaaaaaaaaccaccttcattaaaattaaatataacccattgttttattaaataaaaacacgagtggatgaacaatcaatgcaaataacctcatatattaccagacaatatcaatgtacttccggggttatttttcttaaaacggtgatactggaggatcaattctgcaagctcatcgtcaacagcataaaaatacgcttccggtacatcaagcgctgctgccagcttacagacgagtttgaaatcgggtgcatggacttccttttcatacgaactgatacgcgcgcttgcggattcttcatccagcccagcgagtgcacccagttccgcttgcgtcagatcagccctgactcttgaaatctttaatcttttaccaatcacgattgcaatcctgcacctgaacatgcaggaattatccctctctgggcagcaaccatcttcaggcattcccttacctattcatgtattacttgaattttgattacatttagagcaatattcaagaattgcgtgatttatcacggttaaaaagagaaaaccgatgaaaaagtcaacaaccaaagactggcaccccgccgacatcgttgccgccttacacaagcgcggtaccagtctggcgaagctgtcgcgggaagcgggactggcctcgtcaacattgtcgaataccctgacgcgcccgtggccgaaaggcgagtggctgattgccatcgcgctcgacatgcatccatcagaaatctggcccggccgttacctcaattccagtaacaaacgtgaaccccgaaaaccgcttcacccgatgacaacaaccgacaactccgggacataacgacccgcgctgtgagtggcaggacgcattaaccaacgacacctgacaggagagttgtttatgcacaccgaaccacaaccatgcaccatcgcaccactcgcaggaggccgccatgtttctggtctccctggctgaaggctttatccacctgttccaggccgcaggcaaaatctttctcgacatgatgaccgggcttatcccgatgctcatctgcctgctgctggccatcaatttcctgatgaagctggtcggtaccgtcagaatggagaaggtcgctgccctgctcggccgctcgcgcattctcacctacggcgtgttgccggtgctcggctggttctttatgagcagccccggcgcgctgacgctcggtaagctcttacctgagaagagtaaacccggctatgaagatgcgctcggcaccaccgcccatcccctcaccagcctgtttccccacgtagtgccatcagagctgtttgtctggctcggcgtggctgcgggggttaaggcactcggtctgcccgttacttcactggcgctgcgctatatcgccgccgccatgctaattggcctgatacgcgggattatcaccgagtacctgttcctgcggctcagcaggcgggggaatgcgccatgatgatttactgcgcacgtattactgccatcgggctgtttgtcgccgacggcctcaccgacaagatgctcatcaccttcgacagcaacgggccgaaggactgtctcgattactcgctgtcgctggagccgtcgttccgggaagagagcctgatgatactccccggcgaccgcctgctgctggcagggcatgattatctggtgactgccgtcggcaagggggtacagcaggcgctgtttgaactcggtcatctgacgctggtgtttgacggtgacctgaagccctgccacaccggggcgattcatctctccggcccggtgccgaaactccatgacctgcacggcaatctggtgattgaggagggacggccatgaacacggtacttattcctcccggtcccggcggctacggtaaagggctttggctgcccgttgccagcggcaaaaaggtgctgtcactgaccgggcgcgagattcatccggtggcgatagaaatcggtgcgctcactgaatcggaagtggtgaacggcttctccgatatcccgcctgataacgacatcctgtgcgtggtgattaactgcgccgggtccctgcgctgcggcctgtatccgcagaagggcatcccgaccatcaatgtgctgcccacctggcgcgcggggccgctggcgcagtttattagcgaggataactacgtctccggcgtgacgatagagcaactggttctggtggatacggccgaagcgccggacggtgaaccggagccagtgtctgtcacggcaccacggattatcaccactccgccgcctgcacgtggcgcggaaaaactggttcgcatggtcgagcgtaccggcaccgccgtcggacacgttatcgccctgctgtttgccgccagccgtgaggcggtggacgtgtcgctgcgcaacgttatcccgtttatggcctttgtctcactgctgattgccctggtgcaggaaaccgcactcggcagcctgattgcccacgccctgacgccgctggcgaactcgctgtggggactggtgctgctgtcgctcatctgcggcattccgtttctctccccggtgctcgggccgggggcagccatctcgcaggtcatcggcgtgatgattggcacccagattggcgcgggcgcgatatccccggccttcgccctgcccgcgctgttcgccatcaacgtgcaggtcggctgcgacttcgtgccggtaggtctttcgatgcaggaggcgaagccggagaccatcgcgaagggcgtccctgcctttctgctctcacgtcagttaacggggccgctggcggtcatcatcggctggctgttttccctgggcttattctgaggacatcatcatgaacaaaatcagagccgccgtggtgggtgcaggtatctacggcaaacaccatatgaacgcgtaccgccataacccggacaccgtgctggttgccatctgcgacaccgatacagaacgttgtgacgaccttgccatggcgtacgggatccagggctacacacgactggatcggttactacagcaggaggctattgatatcgtctcggtggcgacaccggatccgtaccataccgaatccatcctcaccgccctgcgccacggtcagcatgtactggcggaaaaaccgctcgccacctcagtacgcgagtgtgagcttatcgtggagatggcgcagcagcgggacctgctggtcggcgtcgatttccacaaacgctgggacccggcagtaatgcgcattaaagccgaactggaaaatccggagaccggatgcatcctgcgcggccatatcagcatggacgacgtgataacggtcccgacgcagtggctgaactgggcgggcgcaagctccccggtgtggtttctcggttcccactgctttgacctggtgcgccacctctccgggcaggaggtggtatcggtgtacgccgtcggacagaagcggctgatggtcgaatgcggcctcgacaccttcgacagcgtgcagagcctgctgacaatggccgacggcagttcgtggggggtggaaaactcatgggtgctgccggagggctttccgaaggacaacgacgggcgcatcgacattctctgcgaggcaacctatatccgcagtacttcccaacatcgcgggctggaaatcaccacgccggccttgacgctcacgcccaacagctatttcatcaactaccgcaacggcgttgccagcggctttggtatcgacccgatcaatgattttgtgcgggcggtcagacataaagccccctacccggtcaccgccgaagacgggctggcggtgagcaggatctgcgaggcggtacaccgcagccttgagagcgggaaacctgaagatgtttaaacaaacggcgcagggtagctccctgtgccagttccatatgattttgctaattctacttactggtctattcactcgtcaggctttggcccgcagatatattaatgttttccatcctgccgcaacaaaaccccacacacgattgtacgttttttagtcattaaggtgaatagcggtattttatggctatgacctttttcaccttcctgccaatagtatcatgctaaacctctcatttatgtttattgcgccaataatagtcaacaagtatttcaaaaaagtcccaagcaaattataatgctggagtttcataatgtccctttaaaaaccattttaagaagagctattatgtccctccctacaaattttaatgatattcttcgtttttttgaaaaagattacgatacagccaaagaagataatgctttaagtgcacgcggccaatttctgcaactttacccccttaatcacctaaaaaaaatgacgcttgatgactatgtcatcggcaaaggtacagcttcattttgtgcttgtgttgaagtaaaaaccagaacatgggcaaatatgcaaggtgcgacggcgctcaaatttggtatttattatggaaaatcaaaatcagatccaaccgtccgctatcgttttactcagaaatttggcgatgatgatagtactaataaagaagttttcgctaatgttaaagacgctttactagacctaatacagtcagggaaagaattagattttagagcgattgacgagaaccccctatcccaaatgtttaaggctaaaatattgagcctttactttccagaacactttataaacatttgcagcaaagatcatcttaaagaaattgctatggaaatgggtataaaagagcaacagtttattagtaaatatcaacatttgttattcaagaaaaaactagagcataaaatcacccgaaactggagcaatccaaaatatatgtccttcctttatgcccagttcatacgtaaggatcttagcagcgctcctgctgtgatagttaaaaaaccacaaaaaagaaaccatcccgaagtcaatttcgaagaaataacggacaatcgtgatttaataggcaaaaaaagcgaagaatatgcattaaactgggaaaaaaaccgcctaatcggtctcggctattcaaaactagctgaggaaatagatgatcgccgtaatcgtccaacttatggttacgactttctttcttttaatgccccaggtgatgagcgatacatcgaagttaaatcaattggccgggatggaaaagagggagcattccgttttttcctctcaggaaatgaactcaccgtttctaatttaagtaaccacagtaaaaactattatttttatcttgtacagtatgggaaagatggagagccatgcaatctatatgtaaaacatgctcaagatctttacactaatagtgaaatgtccccttgtgcttacgttgttaggttcgatctggaagaacctgcttaatagtttcgacaacctccggctcataactttaaaagtgtgaaatcaggcgcagagttccccctgcgccttcacctcagtgatgctgtaacaacacctgtgaaatcttcctcgcttcacctgccggatccgccgcatgcgtgatcgctgatcccacaatcactacatccgggcctaacagtgcgtagtccttcacagtctggctactgataccgcctgccacggcaatccgggctttccggcgcaccttcaacatcgttatcaaatcatcaatcggtttgcgccctgctgcctgctggtcggtgcctgtgtgtaccgccagcatatctgcccccgcctcctccagcaggcggactcgtgcggggagatcgtcgacgcagatcatatccaccaccacctgctttccggcctcttttgccgcgcggatgcacgactggatcgtcagcacgtcggtcacacctaacaccgtgacatagtctgccccggcgtcgaaaagcagctgcgattcaaaatggccgccatccataattttcgcatccgccagtacttccttatgcgggtatttttctttaatggctttaatcgcgttcacgccttcccgaataagaaagggtgttcccacttcaataatatcaacgtcatcaaccaccttatccataaataccatcgcttcaggcagggttaactcgtccagggcaagctgtaatttcatgttggtttccttgtgtcgaatgactattcgaggttggcgtgcagcgcaaagcctttggttaagcgatatcccgtcgactgcgccagattcacaatcatggcgtcacccagcaccatgaccgcctcttcaaacaagctgccgccgggcagaatacctttcacattctcgggtccatccggcagtttgtcggaataagccgggatcctgaccgccacccccgccagtttccccagcgtggactcggggaaaatggtcagcaaggccacagtgccacccagttgcttcgctttcgttgccacattcaccagcgaagccgtttcacccgatgcactcgccagtaacagcaggtcgcctttttgcagcgcaggcgtgaccacatcgccgacaacatgcaccttcaggccgatatgcatcaggcgcatcgcaaaagctttcagcatcaacagcgaacgccctgcgccaaaaacaaataccgctttcgcgtcagcaatggcctgctccagacgcgccagcgcagcgccatcaatccgcgacatcgcctgattcaggtcgctacaggcaacgcctgcaacagattgcgtttccatcatgcgtcctcctgacagagcgggaataaatcatcctcatactggagcatccccatgatttcccggacatagttatcgacatgccccagaaaatgaaaacgttccggtgcggcgcggtagcgctggtaaagcggcatatcgaaggtgatgccaagatgcgggttctctttgacggtggcgaatttgatgcgcggaacacgcgggtagtagtgattcttgcgcacgcagagctgcccgttctcctccacgatgtagcaggccataccgtggtaaaactgcaccgtgtcgtagtgaaccgtacagggtttatacgccagattgctgaacaccagcggcccgtcgccgatattgatggagcagtggccataattcggcggcacgataatgctctgcccctccttcacgacggccacgataagatcgtctaccaccagctcctgcggcgcggcggcaaaatccggcgacttttgcaggatatacgccgccgtacccttaattacttcatacacctccggatgggtgttgcgccgcgtgtcgttatagccgtgataatggccactggttttcttacgctccttgccaatcgtccccggcatgatgatggtgatgtcgtactgatactggtcagcagcaagccgttcctgatcctccgcaaagctgagaccgcgataaacatcgtaagccggttcattacgcagcccttcggtgaactccggtaaaaccaccgccatctgcccggcgcttttgcggccaaagccgagatagtttagcggcggtttcagcgccattacgccatcatcatcgagatacagcggcaggccgctgtggtgtagctgtttcatttttgccccctgtatacacgtcatacttcaagttgctgctacgttggctgcgcgccttcatcccggtcacatagttatctatgctcccgggaactcacgcgcttgccgccttgctacaactcgaattatttagtgtatgggttcacaatgtccggaaaccggatgcgctttaatcgcgcggatcgcctctttcagccggtcggatttcatgccaaagacgctctgaatgttgttcccgacctcaacgacgcccgccgcgccaagctgtttcagcagcgctttgtccaccagcgtcttatccgtcacgtcaatgcgcagacgtgacatgcaggcttcgatgctggtcatattccccaatccgccataggccagaatgatgccgctcaccaggtcgttctgttcgctttcctgcgccacagcggtttcttcgacttcacggcccggcgtcagcaaattccagcgacggatggcaaaggtaaacaggacgtagtacaccgcgcccatcaccagcccgaccgggaataccatgtaccagtgaggcgctcgcggcagaacgccaaagaagagatagtcgataagcccgccggagaaagagagcccgatgtgcacgctgaaccactccatcagcaggaacaccagccccgccaggacggcgtgaatgccatacagcacgggtgcaacaaacaggaaggagaactcaatcggctcggtgataccgcagacgatggaagtgatcgcgccagagagcataatgcccttcacacgcgctatgttttccgggctggcgcagcggtagatcgccagcgcaatcgccggaatacagaacatcttgatcggcgtcagcccggccataaaggttccggcggtaatcggcacctgatctttcaactgggcaaagaagataagctggtcgccatgcaccacctgcccggctttgttcacgtactcgccaaactgcagccagaacgtcggccaccagacatggttaagaccaaacgggatcagcagccgctcgacaaaaccgaacaggaaggcggacacgcccggcccctgcaccgtcatggtattcgacaggccattaatcagatgctgaaccggcggccagaccaccgccatcaccagcccgacaaacagcgcggcgaaggaggtcactatcggcacaaatcgcttgccggagaagaactccagccatgaaggaagctggatgcggtaatagcgtttatacagccaggcggcgataatcccgataatgatgccgccaaacacgccggtctgcagcgaagggatgcccagcaccatcgtgtagtcacgcacctgcgccaccgattcgggcgtgatccccagaaactggccgatggtgacgttcataatcaaaaacccggcgatcgccgacagcccggcaatgccctgatcgtcactaagtcccaccgccacgccgaccgcaaacagcagcggcaggttggcgaaaatcgcactgcccgcttccgccatcagcttcagcacgtgaaccagcccgtcagtgccgagaaacggcaggctggcgacaatattgggatcctgaaagctaacaccaaaagccagcaaaataccggcggcaggcagcatggcaatggggatcattaacgatcgcccgatgctttgtaacatttgcagaaggttgaatcttttcatctcgatctcctgagcgcgtctttatgacagggattcgcacaacagcaggttctgctccgaacaccttcagtatccgaacccgaaatgattaaaaaaacagcaaccaaagacgaaagttatttccggttttcgcttaaaaccggaaaatttatgagggcaatcacgccagataccgtcagaaagggataaaagaggaaatcgcgttcggcgggaggccatcatatgagtatcttcgaggcgcattttcgcaggctgcacgcccgctacggcgcaggtcagacgcacgaattacagatgcaggagatcgccgccatcttcggctgttcggtgcgtaattgtcgtattgcgctaaaaaagatgcatcaggaaaaatggctcgactggcagccccagcgcgggcgcggcaagcgctcacggctccatctgttaacctcgccggaaaagctgttcagccagaacgtcaataagctgctggagaagcaggattacggcaacgtgctgcggtttatcggcaacgacaagtatctgctggatcgcctgagcctgtggcgctttggggtacaggataaaagcagcgaaacgcgggtacgcatcccctactatcgcaatctggatccgcttaacccactcgtccccctgcggcggaccgaacgccaccttctgcgccagtgcctgagcggactgacgcgctatgacgccgttcagggcaggatcgtccccgatatcgcccactactggacccataacgaggactttacccgctgggagttctggctaaaatccaccgcccgctttgccgatggctgtgagctggatgccagcgccgttcagcgctgcctgctcgccgccagccagagcccgcagttcgcgccgattttcagcccaatcaaaaccattaccgctgacgccccctggcatctggtaattgaaacgcatcatccggtcagacggctcgactgcctgctcgccacccagccgacgatgctgtttgattaccagcacggacacatccgctgtaccggcgctttccacctgcaggagcacagcgacaattttatggttttgcggcgcaatcaacactggcatcaggcgcgccccggactggatgagatcaccattttcacctgggctccggagcatatcagcatgagctttattcccctgctgcggggcgaagaggtgcaggatgaccgcccgctcaacgagcgtagtctggagcagagctgctgctttgtgctgctcgacggtgacggtgcctttgcagatgaggccggaagacggtttatcaattacctgctgcaacctgtcgaactcctcagccagacgcagcttcccgacgaatacgcacgcatcctctctgtggctcagggtatgctgccgcagtggaatcaccgcccggtagattttggcgggatcacagcgccgtttaacctgcgtcagccggttattatcagcacctttcagcaaccggaactggtggagcttgccggagcaattcgccgcctgcttgaacgctggcatattcgcgccgaaatacggatcgacgcatttgaccactttaacaaccagctgcgccctcccgcggatatctggctcagcaactttatgctcgataccctttcggttccggcatttctggaatggctagcttccaccgcgctgtttacacgactgcctgaatcccagcgacaaaacctgaacgcgctgttaccgacgattctaaacagcgacgatgaacaggcgttcgctaccattgccgcctttttccatgagatgacccaccagcgatatgtcattcctttgctgcatcactggatggaatttgcgactgagaagtcatttacctggcgggatttaaatacgctgggatggccggatttcagccaactttggctcgaataatgctacgcccgcaaaagctcgctaaagggcctttaaaggcctttaagggtaagggagataagtgcgccattgtggctgtcaattcgttttgtttagctcttcctgattttcttcttgcctgggagaactggcatattttttcgtttctggatccagaggagctgcgtccggcatcagagtaacattccgcatggtacgttagatcattctgcatacccaattctgttcgtttaagtattttaggtacggctgagatagcgtggtttgaaccatcagaacaattaaaatctacacccgcaaaggctcgctttagcgagcctttgcgggcggcatttctggataattatccatgaaagcctcaccagagatgtaaaagaatccttcctgccgcggcattctctggacaatattttcccaatcttctgatgctcatgaaaccgcatactgcatcatgataataaagttatttattatcaatgaattatgcggattaaatcagcttgaccatcgcatcaacaatgctatttttacggtaactgccgcagtcctgggactgcacccgagacagccacgaccttagaggactgtgcctggctgctatgtcaggttggtcaagcccttaaccccgcaagccggacaatacggcgggggcgtctctgacgcagtccggtcgttgttgctgctataacctgtgccagtaagaggcaggttggtaccgcctctttagacggagcgtatctctgcgccagtaaacaggttgcctgaaacggcggcgcgtcactttggaggcgaagcaaaacaaagtgacgccgacgcacaccgctgcgccagccgccgtcttatcaggcttatcgttgtattaaccctctgacgccatcatttctgcgtcaaaaagataacaaggaggaatgaacagtaccggaggcggaccacgacgatccgggggcatccctgctgaggcaggcggcctgcacaccgtgcagtaccgtaccccaccatacctcaactctcgccttccggcgcaccggtattgtttagcatggcgcagctttcgctctcccatgcattccccacgcgccggaaaatattgctaccgcatcaggcggaggagtcagcatgtcgcgactggcgcaggatatgaaaaaactggcgcaccgcgcaggtggcagccacaaaaccgtccacgaccgcgaacagatggcgcagcgttttgcccgtcatttgctggcgcagaatattcaggtcaccagcacctgccagctcaaagccagacacatcgcgggatatattcatgaatggctggcgcagggtatttctctgcgaacgctacagaatgagatggcaatggtgcgctctattctggctgaagccggacgcacacaactcagccagtcagaattaatcagcaaccagtcgctcggtatcagtggtgccagctgtgacgggacgcaccgggccattccggatgcactttaccatcaggtactggaccgggttcatcatatcgacgcaggcctcgcagccagcctgcaactggcgcgggtgatggggctgcgcggtcaggaagcagtacagtgctgccagtcgctgaaaacctgggataaacagctggaaaaaggggctgaacgtctgccggtgatcttcggcaccaaaggcgggcgaccacgcatgacacaggtgacggaccgggaagcggttcgtcaggcagtgaaagaggcgcttgggattgccggggagcgtaacgggcatctcattgacaagccggatctgaaatctgcaatggactactggcacaaccatctccgcgataccgggctgacgggggaatactctccccactccctgcgctatgcctgggcgcaggatgcgatccgctattacgaagagcagggtctgagccataaagaggcgctggcggtaacttcaacggatctgggccatggtgatgggcggggaatatatattgagcaggtatacgggtatactgattgaatctcactaatacaagatgtttcattcctttttgtatgtaaaaattcataactactttaaaattttaaatgcacaataaaagtatagatagataatgtgtactgtttccatttcaccgcacttgagtttaaaataccaagattcatctaaaaccaagattgtgtcatgaaaatttcatatttaaaatcatctccgtcaatgattgaagttttaaaaaataactatgaagcatttataattcaaaactataaattcaatcacttaggtttatttcatgacgaagacagtatttatgctgtaatacagaattacaaagaatctaatactacgttagatgaaatacaagaactttacaactacagatttaaaaccgcaggtgttccgggaccaacgtttacagaagaagtaaaagacaactatataaaaatagatcttagaaatacatatgaaaaagtaagtttatttggccaaccatttaacgcattcgaatttaataataacatacgcatagccataccatctaaatttcatccttttcatgttgacatgaagtggtccgacaacagttttacatttaccttcaataaagaacttactcctaatgatattgatgaaatcattttaatatgtgaaagcttaggtttttatggttataaatacaatattaaaacagaccatgaactacctgattataatcatcaaataaagaaaagtaatacacaaggaaatcttacattagttgcgagtcaataccttaggaataatcaacctaaagaaatcttggagaaatatgaagaggatcaagacttttggacagaaaaaagagccaatattttttcagatgtcaatctaaccaaggatgaatgtcttattgattcattcagaaagagtcaaaacagatgctttgtcgatgccagtgtatttccacgaaataacataagagaatatatatcactgtatgacactgtaatcattgcaattccattagcagattcacccaatagtcagagtttttatgacatttttaaaataagcaagattgagctgttagagttagttcgacgtggacgtataaaattcgtcgcattccaaaatctccagcggtatgattcaaattttttggcggatgttctgtctgttgatccagaatgtgtattattttcaagaagattagccgccgcgacattattagcaattagagaaaaaacaggattatttggattcgcatttgatagcagcactcaatataacttattgaaagaatgctacaattcaaaagtcgatgcacttaaaatattagcagagtcgttatcggaaaatatagcattttttgagtatggcataaatcaaagaggtgcattgggtattagtcaattttgtggggcaagctttgcagcccaaatatataaatcacgcggtcgcgattatggtattgagctaatgacaagcgcaatgtcacttgagttctcactagggctaggggcacatcactttccctttgagcacacaggttattctgaggtaaatgcctgtaaaatccttaatggcatatataatggagttcagcaatcacaaaatgaacttcgagaaatggagatacagactttactatcaaatattttcactattaataacgacatgaatgttctcgagttagatgacatcttaagcaaatacagtcgacgtatgatcccacaaatattacaagagtatgcccatctgacacctgaagaattaagctttaagatatactctctaaataaagatattaaagcaattgaaaagaggaagcaaaacttgtctattttagacttgtcaggttttgccccagtagttgcaggggcagtaatggagtataagggactatcgggagcgggttatattgcgttgctaccatggattttcaaattattaaaagtcaccaccaataattcaaagatattcagcaatgaaatatttagtaatttagaagctttaactttaaatactccaagaaacacaatgttggtacataaaataagacaagacatgcctaaatagtacgttttaattcgatgcattatactatttgcacatcaaccaagcccatacgaatatatgggccataacgatgctttcacaggtatggccatttatttggcaaattttaaatcagatcgtttaatctttttttctagtatagcaactatttctcttaacttttttataagttcaataatcgccctacattgcatccatcacaaataaaatgaattgagaatgagttcattgaaaaaatctcatcaattcataatgtaatttagtgatcttttgaagaataaccctcgatctctataacaacttctaaagtatacccaccattctggcttgcaaaatcctctttggtaatagacacatagcgattatctttctttatcataactgggatcttactaaatagctcattaatattaaagtcatcatcccctaatgcttttgatattaattcttccgcaagcaatgaaatggtattttttgaacaatttgatatgggtgaattatttatattagctcttaacttgagtttcttagcagcatattcatctccatataaataatatgcaacactatcacgaaataaaccatcattaccaatctcaatcatatgactacatgatatccaagtatcaaaactgaaatgataatcattggtgtcaactccttttccaacaagaaaatctttggctaagaatggtgaccacccatatttattatctacttcgggtggattagattcgatttttttccgtaattttacgtcttttaaacttgccttaattccttctttcgtcttaatttcattaatatgtatgtttcttacccagcgattaagagcatcaagatctgttctaaagaagcaaatcgctaatttttttgcataattaaacagagcctcatcgtcaaaatatatttttaatcctaataacttagtttcataagcttgataaaggtaaagcatataaataaatggcataaacgaaaatgataataaaactggcgtcagaagttcagtaagattagcccaagaaaacgttaccgaaggcgacataattgaaacaaaaaatgaatgggcaaaataaaatataacgaaaacgcctagcactacctttatcgtcgctccgattttttctgtttcttttttcgtattagctacgacagccagcaaccctaaaaaaagcataatagggtatattataaactctatagcaaaggaaaaactttgtagttcaagaataaatgtaagtagagcacttaatccaatcgtttctttgatttgtgatttaaaataatacttactgctctttattttatgtgtttcaaagattgttacgaaagcatatgtaattacccataccaaagtggtcttaagattatctgtactccaaacaccaatttcataaaaaagcacaatacaaatagacgtccaaacaaccgcaaatcctaatactgtcaaaatttgtttatggaaaaatgttttgataagttgataaaaagaatctctaatatcctttttacaccaaagcagagcaatgattattaacatccatataacaaaagcatactctctactattaatgtccatttagtcaccattactcagttaaattcatttcaaagttacattttatcaagcctttatcattttaaactgaattacggtaggcgtaccaactttgtataagatagaatacaacaagcttcatgcttcttttttagatagtttgttgttcgtgcctatcgtacactttgcgactgttcgttttgcatctattccaagcatcaatcaatacaataaatttcagcaccataaagataataataaaaatcaacaagatacgaaaaccccttccatatcaacatcatcaccaccctttttgcgccttcccttccccgcaaaaaataaaaatctccaacaaactcaaccatctcccccaccaattacaaggacgccagccactttttagttgtttgaagttcaatgaagtctactaagcccgcacagcacaagctctgcgggcttttttacgtctattgtcgtccagtgagaattgctgagaactacgagttatggcaccctgaatgagacccactaagaagggtccaaaaatcgagggtcccaaatggcaaaaatcgctaagaagctcactgacactgaaatcaaaagcactaagccagccgataaagaaatcaacttgtttgacggtgatggtctgattctacgaatcgctcctttggcgaagggagggaagaaaaattggtatttcagatatgcagtgcctgtgaccaaaaagcgaactaaggtgagcttaggaacctatcctcatcttacacttgccaaggcacgagctttacgtgatgaatacttgtcgttgcttgcaaatggtatagacccactagttcataacacccagaaagccaatgccctaaaagatgcaacggaacatacatttcaagcagtagccaagaagtggcttgatgagaaagtcaaaacgtcaggcatctcccgggaccatgctaacgacatctggcgaagtcttgaacgaaatattttccccggtctgggtaatgtgccaatcaatgagatccgtcccaagctcttaaaacagcatcttgatccaattgaacaacgaggagtactggaaactttgcgacggctcatttccaggttgaatgaaatcttccgttgggcggctacagaagagctgacccgcagataatctgggccaacgtttcagtaagcctaaaaagcagaatatgccagccctacccccctctgaactccctcgttttctggcagcactgaacaatgcatctgtccgtttagaaacaagactactgattgaatggcaatataaacagacccgttttagttccaggcattttttgagatcccggtcaaatgattgtgttgccgatattcctccggcgtcatattgttcagtgattcatgagggcgttcacagttatattctgacacccatctttccgtgatttcccgcacttcattcagcgttctgaacagataaaaatcgagtatttctgtacagtatgttcggttaaagcgctcaataaaagcgttctgcgtcggcttacccggctaaataaattccagttttactgcatgttgctctgcccattcagccagtgcaagtgagataaattccggaccattatccatgcgtagcatgaccggatagccgcgatttgccgcgatcctgtcgagtacacggaccacgcgcaaggctggcagattcagatcgatttcaatcgacaatgcctcacggttaaagtcatcaacgacattgaacgtgcgaaaacgacggccacagaccagggcatcatgcataaaatcgacagaccagctctggttcagcgcttccggcgtggccagtggcgaggggttacgcaccggcagccgttgtttgcccttacggcgaaaatccagcttcagcagacaataaatacggtggatccttttgtgattccacatgtatccctgccgccgcagaacctgaaaaagcttcggaaaaccgtatcgtggataccgttcagctgccgcctgcaatgcggtaataacgggttcgtcacgtgtgttatccggacggtaatgataaaccgttctgctcaggttcaggctccggcaggcctgacggatactgagtccgaatgccgttatcagatgagtgaccagctcacgcttaaaggctggttttaaagctttttttcgataacgtctttcagcgcccggttctcaaggctcaggtcggcaaacatctgtttgaggcgtcggttctcgtcctcaagatcttttatctttttaatatcagaaggttccatgccgccgtatctggacttccagttatagtaggtggcttcagatataccggcctcccggcaggcatctttaacggttcgtccggcttcaaccgatttaattacggcaatgatctgatgctcggtaaaacgggctttacgcatagcgatctcctttgttggcagattgattatgccggaggatctctaaatgtgaatggcacgattatgcgggatacttacaatggggcgtggaaaagactcttaggtaattgttgtctgttgtaggacatagcggcaggttaagcagtgaaattaggaatagttagcttggagttagatgcagacgttcttcagatactatttcagattcagttcgtgcatgtctgcagtaacttctgcaatattaccagcagacagtgagcaaatgtgtgtctaggcatagaatccgcatctccccacgcctgcgggacagtatccagagcggactaagttacttagatatctggctggcaacggaaacggtgagaacaatataaaaatgcatttatcaaatttaaataaaatgattgcttattttcccattactaatgagcgcccaacagggcgcttgtgaatcaggtcagatatggccgatctttactgacatcaaacaagtccaagaaaaatgtatcgcctatccgaatattagaaccaatctttacattagtagagttgttgcagaagaaatcaaagtgatatcttggatgcactttacccctagcatttttaagatcatcgtcaaatctgaagtatccgtgatcaactaaaagcaatgaagaaattgcatcacaataatttattgcctgctgaatatctctatcaaagttatcacataattctacagcaatggcctcgtaagaaaaggagccattaccgcaagtagcaattacatttctgcatcgggaaataaattcagcattaacaggaagagcataagcatcataattaaagcagatattgctttcatactcgattacctgaaaaggtaagttcatagtaaaaaaaccatctgttttttttaccaatatacgcttatgtgtacctgtgcttattaataaatcgaaatcctttgtttctttattccaggactcatgacatgtgtttaatatctctgcggtaacaagcagattttctaggttagaaaatgcatcccttacagcacaaaacttgtcaagatattctgctggcacgttattgaaaaagtaaaggctcatagttttttgttcctttcatattctatttcaatcaagcctttaatgtattccccgtcagcatcatcatcttccgcaattatcctttcgactcgatcagttatttttgctattagtcgaggtgtagacttcttgtctgcgcaataacttttaaccatctgagaaattgaaaccgactcatctagaacaataaaatctttttgactttgtatttcttcatctgaaggaagccttacatccatgtagttgttttcattgagaaagttcagaccttcgagaattgtagggattgccggattttcattatcattatttaaaactaagtgactttctaaaaatgacctcgccatcatagtgtagagtgcatttcgaaaattagctctcttcaccagtttcatggcaaaacaaataacaaatggaaattcaagaccttttgcattatttatattagaaataaaaagtttaccatcttgctttgattttgtttcatgtgagatatttgaatcccacccaagctgttgttttacttttgattttagcgaatgaatgtactcataaatataaccaccggcgtcaagaaaaataacagcaatatctccttgctctaaagatggattgcgttccttaatatcgattataatatcaactattttatctggcccattatctgttccttctaacaaatgaacagcagtacttttatgatttttgggaatatcttcaaaacgcctcaaagggtctcttgataaatggactctatctcctacttttttatatttatacccacaagaatcccattcaggctcttttaaccaacgcagaacaggttcctcgtagagtcccattcctaaggcatgagaaaacatcaaattcttaggatctgtgcggtagcattttttaagaacgatatctgctcgattcacgttatcgctaatcggcatgaaaatattttggaaaacgtcacctgctacatataattttttagaagtaaccatttcacagagatcaatgaagctttgtgggaagtcttgactttcgtcgataaatacgtaatcaagtgcctttttatcagctctcccactattatttatatctgcaatggctttcttacatagggcatcaaaatcgccattaccaaatcccccaaatggaatttcgtaataatggcatatatatctgtacattccagaaaaaggttctttagtcaaaccccaagagttgaagcaaaaaagttttgtaccccattctatctgtttttcgactcgcataaaatcgaaaaactcagggattctggttctcattgtggaagcgagaattttattaaagcaagtaaatgcaattctagaatcagggttttttgaataaatctcttttaatttgtgtaaaagtaattcagttttacctgaaccagctaatccttgtattacactcttttttccaaagccactctggaagacaaactttgtttgatccgtatcaaataaaataattttggattttattgtatctaataaattatttgcttcaaggttaattcttgatgtgtcgttaatactaccaacaataagtgagataattaaatcaatcaccctactttctttagtttcgacttccagttttttgaaatcgatatcattacgagaaagcgattcaaataaaatttgccacgattttttcctgccgatcttatctcgatacttgaatttctccgctaaataagaaacatcttcgagaaaatcttcctgatactcctcaaaaagatcatcgtcatccccaaaatctataaaaaaaggttttataccagaagaaaatactgcaatcgctcggtcataatcatactttacatcctcattagatagaggtctgcaaagaatatatgtttgttttttatgctgctcagcatagctgtttattattacatcaacaccagcactttgagccagagctaatgcatcctgagagtaaaagcagtagttggacattaaacttcctctttagcgggttgtctactcatttcaaattcttagttgtgtgctgtgcgagctaatgactgtctttgttctgaatcatactctttacacagaaaaaaaacactttgcagcttcgttaaggtggctcgcgttccgataaactttagcctgctctgcaatgtcgtatcgtaagttattcgttgggatgagagggtaaacctacctgatcttacccagcaatagtggacacgcgactaagtgagtaaactctcaagtaagaggtgactcacatgacaaaaccagcattaaccaccaaaaagccacgcaagcagcacacgcctgaatttcgtcaggaagccctgaaactggctaagcgcattggtgttgccgctgcagcccgtgagctcagcctgtataaatcacagctccacaactggcgaagcaaacagcaaaatcagctctcttcttctgaacgcgagcaggagatgtccgctgagatcgcccgtctgaaacgtcaactggcagaacgggatgaggaactggccattctccagaaggccgcgacatacttcgcgaagcgcctgaaatgaagtatgtcttcatcgaaaaacatcaggctgagttcaatatcaaagccatgtgccgtgtatttcaggttgcccgtagcggctggtacgtctggcatcagcgtcgtcatcagataaaccggcgtcagcggttccgccttgtctgtgataacgtcgtccgggaagcattcagtgacgcaaaacaacgctatggtgcgccacgcctgacggatgagcttcgtgctcagggttaccagttcaacgtgaaaaccgtggcggccagcctgcgtcggcaggggctgcgggcgaaagcctcgcgccggttccgtccggtcagttaccgcaaacatggtctgccagtctcagagaatctgctgaagcaggacttttacgccagcggcccgaatcagaagtgggtgggtgacatcacgtatcttcgcactggtgaaggctggctttatctggccgtggttatcgatctgtggccgcggtcagtcattggctggtcgatgtcctcgcggatgacagcacagcttgcctgcaatgcgttacagatggcgctgtggcagcgtaaatgtccggaaaatgtcatcgtgcatacagacagaggcggtcagtactgttcaacggattaccagagcttactgaaacgccataatctgcggggaagtatgagcgccagaggttgttgttacgacaatgcctgtgcggaaagcttcttccatacgctgagggtggaatgtatccacggagaggactttgtcagccgggaaataatgcggacagcagtgtttaattatagtgagtgtgattacaatcggtggcgtcgtcacagtgcctgtggcggtctcagtccggaacaatttgaaaaccagaacctcgcttagggttgtgcccatattacgcgggtaggatcaagcttccttcagtcttttggggatcataccgtgcaccttatagggatttcacggtaatatttagtaatgctcaagttcttttatttttagatttcataaagatagaaaccataacattaaaggggggtactaacacgaccaattaacttattatgcaccttttccactgcacccgttttcccccatatagcttcagcattgcatcagcaaagctgtcatccagcgcgtagaattaaccttcaggcaaattgagaacttcagcaaatcgacaaaccagttcgaagtgagttgggttatcaacccacaaatagcattaaattagacactatgtaaaacttggaacccctacagtatcacagaaggcgttggcgtacccattgagccaaatttgagccttcataaaaggcctggtaaattttgggattattgggatcgatagctacggcctcttacatcgcttcaactcgttcggcaagcatgaatgaagagtaatcatcaccagacgacaatagtgtaactgccctctttcctggactgttccggtatcccaggagaaagtactttatcagtgttcatctctcttatgatgcccgtgaacccaaatgcgtcgcggaacctacttttaccttcttctgacaagagcaagagtctggcacgatgaataccttccatgacctccgttcattaggtcccctccggtagccccctaagttttacttttctcacggaattttttattaccgtaggcgttattcagcgtagtccgaagacgtgatcctgctcacccagtcaaacataacttgcatatgattgccattggatgtcctcacaccaacctgacacgcatttacgcctgtcgttttgccagtcaaaacctgtccatacttcatatagattttgataccgactccctgtttatagcacttattgcaaatcgagaaataatctcttcttgatggagtatattgctgaagattaaatccgtcagccggcaccagcgaaagattaaaagcgtcattacctgataattcttcaagaattgccagagactctagtttaacttcaatgcgcttatttcctttaggtttatccgaagccagaatcaaattttccttcggattaaacttcgcaatgtagcctgtgattatccgggcattattactcaccaatcgaacagggatatcattaaaacgtagaaattgaactcgacgagcaagcatagaataatcccgcggccatatttcagcttctcgcccgtaggaaatatcatttacagccatacattccataaatatatattcatctatgctaaatgaaaaagccccgaattcacggggctgaataaaacgaaataaattaacgtaacagagacagcacgttctgcgggacctggttagcctgcgccagaacggaagtaccggcctgctgcagaatctgcgcgcgagacatgttggaaacttcggtcgcgtagtcggaatcttcgatacggctacgcgcttcagacagattgtttacggtattgcccaggttggtgatagcagagttgaaacggttttgtaccgcacccagatcagagcgcagcgcatccacctgcgccagcgcggcatcaattttctgcagcgggttttcggtggttttagcggctgcttccgccagctctggttgtgctttgaaatcatgaccagcggctttgctggcattgtaggttttaccgtcgatagtaacgacttcggttttaccgtctacgccacccagttggttagccgctgttttggtagtgccgtcagcagcagtataacttgtagttttagctttaattgctcctgtcgcttcatcgtaatctgcggcgtaatacttatcgccagctttaagcgcataaccgccttcaattgtcttaccatttttatcggtataagacattttgaccaactcagcgccattagcatcggtagcgtcaacgccgccagcaattaaggcatttttagcatctgctgaaacaactgccggtgtatcttttaactcctgtacttctgttttagttgtcgcaccagcaggcattgtggttttagttgcgccagccgcaagggttactgtaccgtcagtagcaacgttaacttcataatcgccatttttggcggcatcagcaccagtaaagccaccaatagtaacaaagtacttgttattatctgcgtcaaatttaaccgcaccaccggttacagaagccgtaccattcgtaccacccgtagccgctttaatagctgcatcatcaagacccgatacatccagtgtagtaccattattggcataagctttcgttgttactgctgtatctttcacatcatacgctttctgcacgttcagtgagtccagacccagggtctgagagttgatctgcttcagatcgatatcgatagtttcaccgtcgttggcgccaacctggatggtcagggtgttgtcctgcgccaggactttcacgccgttgaactgagtctggccggatacacggtcgatttcgttcaggcgctgggtgatttcagcctggatggagtcgaggtcagactgggagttggtgctgttagcagactgaaccgccagttcacgcacacgctgcaggttgttgttgatttcgttcagcgcgccttcagtggtctgcgcaatggagataccgtcgttagcgttacgggaagcctgagtcagacctttgatgttcgcggtgaaacggttagcaatcgcctgacctgccgcatcgtctttcgcgctgttgatacgcagaccagaagacagacgctcgatagcggtgcccagtgcggactgggatttgttcaggttattctgggtcagcagcgacagactgttagtgttgattacttgtgccataaaattttccttttggaaggtttttgataaagcaatcctccatgagaaaagcgactaaaattcttccttatctgatgtaaaggagaaaatcatggctactattgggtatattcgggtgtcaacaattgaccaaaatatcgatttacagcgtaatgcgcttactagtgcaaattgtgaccgcatttttgaggaccgtatcagtggcaagattgcaaaccgccccggcctgaaacgagcgttaaagtatgtaaataaaggcgatactcttgtcgtctggaaattagacagactgggccgcagcgtgaaaaacctggtggcgttaatatcagaattacatgaacgtggagctcacttccattctttaaccgatagtattgataccagtagcgcgatggggcgattcttttttcatgtaatgtcagcactggccgagatggagcgagaattaattgtcgagcgaacccttgccggactggctgccgccagagcgcaaggacgactgggagggcgccctcgggcgatcaacaaacatgaacaggaacagattagtcggctattagagaaaggccatcctcggcagcaactagctattatttttggtattggcgtatctaccttatacagatattttccggcaagccgcataaaaaaacgaatgaattaaaataaaaattacaacaggatggatataacatttttgtaatacaggcgtgtggcataaataaaccgaaagggtatacaaaaaagacagcatctaattaaaaagagaaaaaattcaacgtattaacatatatagtgtaacgcgctcacgataaggcctatgttacatccagctatagacgacatcgctcaaaacactaccagacacagtattcacctggaaaggctttttaatcaaaatgttagatgtaagcaattacggacagaaaaaatagtaaagtttatgcctcaagtgtcgataacctggatgacacaggtaagcctggcataacattggttatcaaaaaccttggttttcaagaaccaataaatcgtgtggctgatgcgctataaaaatcgcagagcggtgacgatattccgcataaggagctgttcgttcgcaacattcgaacggtgacgttaaagccggtttcattggctaatgaagacgaaggggacaaaattcctacagagttgataccacagagatagtccaggctcgcaggtgatacgggatttaacgccggaaagtctgcacagaacacgatctgccgccggacaccattaaattgccccgcaacgtgttatcaatactactccctacgtttcccgttaccttgctgtcggtacgtttacctcattgtctgaaaggttatttgcgaagttatcattaataatccacgggcgtctggtatgcgaatccagttccccaatcctggcgctttgcctgtgcgaccatacgcgcgtaaataagcctgaaaccaaacttcaccgcttaacgctctcatctttcccgatttttacgcaaaaaatcatcacatgatcaagtgtcatattagttattgcattttacaaatgatattggtaattattatcattctcattaacgacttgttcgatttatgacgtggagagagaggatttctcatgcgtattctgtttgtcggtccaccactgtatggactgctataccctgtgctgtctctggcgcaagcgtttcgtgttaatggccatgaagtactgattgcaagcggtggcaaatttgcacagaaagcagccgaagctgggttggtggtatttgacgctgcgcctggtttcgattcggaagcgggttatcgccgtcaggaggcattacgaaaagaaaataacattggaacaaaaatggggaacttctcattcttcagcgaagagatgactgacccgctggtcgcgttcgccgggcagtggcgaccagatctcatcgtctaccctccccttggggtcgttggaccactgattgccgctaagtatgacattccggtagtgatgcaaaccgtcggcttcggtcatacgccctggcacatcaaaggcgtgacgaaatcactttctaacgcctaccgccgccatggggtcagcgcgccaccaagagatctggcgtggatagacgtcacaccgcccagcatgagcatactgcaaaatgacggagagccggttatctccatgcaatacgtcccgtataacggcggcgccgtctgggaagaatggtgggaacgtacacctgatcgcaagcgtcttctggtcagcctcggcaccgtcaaaccgatggtggatggcctggatctgatttcctgggtaatggattctgccggcgaagtagatgccgaaatcatcctgcatcttccggcaaacgcccgctcggatttacgttcactgccgccgaatgtccgtctggtcgactggcttccgatgggcgttttccttaacggcgccgacggttttatccaccatggcggcgcaggcaacaccctgacggcgctgcatgccggcattccgcagatagtctttggccagggtgccgacagacccgtcaatgcccgcgccgtggtcgagcgcggatgcggcattattcccggtaagagcgggcttacgagcagcatgattaataccttcctcggtaatcgcgcgcttcgcgaggcgtcgcaggaggtcgcggcggaaatggcggcccagccttgcccgaccgaggtggcaaaaaaactgatcgccatgctgcaacacggctaaccgcggcagcgcaatgacaatatggcggctgaacccagcgtgtgtcgccatatctcatctttcaccgataaggaggcttaatgcccgcgactcattcccccatgcccgctcgtgcctggatagttcgccttgcccgcgtgtgttgggaacgtaaaacactgagcatcattgtcatcgtagcatcagtatcgaccattttactggctgcgctgacgccgctaataacgcgtcaggccgtcaatgacgcgatagcaggcgatacgacccacctgccgttacttgcctgcggcctgctgttaattgccctttttgattttatcgggaattacgtgcgccgcggctatgccggagaactctcgctgtgggttcagcatacgttacgtagccgtgcgttcgacagtattcaaaaactggacggcgcaggccaggacgccttgcgtaccgggcaggtcatttcgcgtaccaacagcgatcttcaacaggtacacaccttgctacaaatgtgcccggtgccgctggcggtactcacttactatgtggccggtatcgcggtgatgctatggatgtcgccatccatgacgcttatcgtgatttgcgtactggccgcccttgccattaccgccctgcgcgcccgtcgccgtgttttcgcgcaaacggggcttgcctcagaccggctggcgcacatgacggaacatatgcgcgaagtattggaacagatctcagtggtgaagtcctgcgtggcggagttgcgcgaaacgcgttggctcgatggtcagtcgcggcagatggtgcgggtacgcatcggcgccgctatctcgcaggcgatgccgggcgcaaccatgctggcgctaccggtgatagggcaaatcgtcctgctgtgctatggcggctggtcggtaatgaatgggcgcatcgatctgggaaccttcgttgcgttcgcgagttttctcgctatgctgaccggccctacccgcgtactggcatcgtttttggttatcgcacagcgcacacaggcgtcggtggagcgcgtcttcgcgcttatcgacacgcgttctcgcatggaagacggtactgagtcggttgaaggtcagattatcgggctggacgtggagaagatgagtttccactacgacaacggtaaccgtatcctcaatgagatctcgttttccattcacgccggtgaaaccgtggcagtggttggcgcctccggctccggaaaatcaacattgctgatgttgctggcgcgcttttacgatcccacctccggcggggtgtggctcaacaccactgcgggtcaacagaatattcgcgacctgaaactgacggcgcttcgtcgtcgcgttggcgtagtttttgaagacgcgtttctgtttgccggtacggtggcggaaaacatcgcctatgggcacccgcaagcgactcaggacgacattcgacgcgccgccgatgccgcaggcgccagcgggttcatcaatgcgctaccgcaggggttcaacacccgactggccgaacgcggaagcaacctctccggcggccaacgccagcgtattgcgctagcccgggcactgattaccgcgccggaactgctgattctcgatgacaccacctcggcggtcgatgccggtactgaagcggaaattaacacggctcttggtcgttatgccgataatgagcatatgctgctggtgattgcacgccgccgttcaacactgcagttagccgatcggatcgtcgtgctggataaaggccgcgtcgtggatatcggtacccaggcggagctggatgcaaggtgtccgacgtttcgctcgctgatgagcggcgagggggattttctcgcccttgccccggcagaacaacgtacgctatggccaacaacgcaggcggtaaaatccgacgacgcgcatgagcgccagacacccgccggaaaaggttttgtcgaccggatgacgcgcgttccagaacgcgccgtacagatggcgctggcaggccacgggcgtcaagtctcatcgctgctgacgccagtagcctggatgttcgtcatcgccgccctgcttatcgcgcttgattccgccgcaggcgttggcgtgctggtgcttttgcagcgcggtattgactcaggcgttgccgcaggggatatgtcgactattggcatatgcgccctgctcgcgctgtgcctggtggcgatcggttggtgctgctatgcgctgcaaacgatcttcgccgcccgcgcggcagagtcggtacagcatacggtacgcttacgcagcttcagccacctgctacgcctgagtcttccctggcacgagaagcacatcgactcgcgtcttactcgcatgaccgtcgacgttgattcactcgcccgatttctgcaaaacggtcttgccagcgcggccaccagcatcgtgacgatggtcgctatcgccgcggcaatgttctggcttgaccccattcttgcgttaacggcattaagcgccgtgcctgtagtgatgctggcgacgtggatttaccgccgtttgagctcgcctgcctacgcccaggcacggctggaaattggtaaggtgaacagtacgcttcaggaaaaggtctccggtatgcgggtagttcagtcacacggccaacaacagcaggaagccgccaggctacgggcgttatcagacaacttccgcgccacccgcgtgcgggcgcaaaaataccttgccgtttattttccgttcctgaccttctgcaccgaggctgcctatgccgccgtgcttttaatcggggcgagccgggtcgccggaggcgaaatgacgcccgggatactggcggcgttcttcctgctactgggacaattttatggcccggtacagcagttgtcaggcattgttgattcctggcagcaggcgaccgccagcggcaaacatatcaatgcgctattggcgactgaggaaacggagaatattgaaccgtcctccataacacctggcactggcgcgctacgtctggaggcattgacattcctctatcccgaaaaaacgcaacctgtgcttgataatctctcgctcattattccgccaggaacggtagtcgcggtggtcggacgtagcggcgctggcaaatcgacgctgatcaagctgctggccgggctctactctcccggtagcggacaaatccgtgtcggtgagcgcttaattgatgccgcgtcgcttagtgattatcgtcgccagacggggctggtcactcaggatgtcgcattatttagcggcgatattgccgaaaatatccgctatccgcggccagacagcagcgacacggaggtggagagcgcggcgcgacgggcgggactctttgaaactgtgcaacatctgccgctggggtttcgtactccggtcaataacggcggcacggatctgtccgcgggccagcgtcagttgattgccctcgcccgcgcccacctggcgcaggcgcatattctgctgctcgacgaggcgacagcgcgtatcgaccgtagcgccgaggagcgcttaatgacctcgctgaccagggtgacgcataccgagaaacgcatcgcgcttatcgtcgcgcaccggctgaccaccgctcgccgctgcgatgtgattgtcgtaatcgataaaggatgtatcgctgaatatggcagccatgagcagttgatagcggctcatggcctgtatgctcgtctgtggcggaacagcatcggccagacacgcgatacgcaaggagaggtcataggatagtttttatcgccacgatttacgcaaaagaaagcccgcaagcggctgttcatgtaacagccgctttagctattgatactgaccgaaatataaacgagatggaatacaaagaatgagactgagcccgcccgtcgctcctgtcgctatacagaccgctacgcgccttcgccgtcaactcgccgccggaagccaggttgacgcttctcacttctggcgagaagcaaactcgctcgcactgccgctggtgacagccattaacggcgcagacgatgaacgggaagtcaccttcctgtggcgtgccgcctctcctctgcggggggtttatgttcgcctgaaccgtgtcaccgataaagataacgtggcgaaaggtatgatgacgcaactgcccacaacggatatctggcatctgacgcttcgcttaccggcgtcctactgcggttcctatacgatggtcgaaataccaccggaaaccccgggcgagacggtgttgcagcttggaagccgtttcgcctcccttgtcgggaaggcggatccgctgaacagcgcgccgggaataaatgttcggggcaatgcgcaggaatccgttctggcgctggatcatgccccggcacaggaggagtggtcaggctgtcgcgcttacgccgggcagcttttcacctcagagcatcggctcgccggacaacgtcgccgtgtgcggctgtatcttcctgacgttcctgtcgtacaaccgctgggcttgctggtactcacggatggcgagatctggttcgaccatcttggggtaagcgccgccattgacgccgccatccgcagcggacgcatcgcgccggtggccgtactcggcattgataacatcaacgcgcgtgaacgcgtcgcaatactcggcggtcgccgcgagctggtgctcgacattgccgaacgcctgctgccaacccttcgcgccaaatacccggaacggcggtgggcggaccgtacacaaacggtgctggcagggcaaagccttggcggcgtgaccgcgctgatggcggcccgccacgcgccagagagcttcggcctggtgctgagccactccccctcaatgtggtggacgccggacaaccgcaaccgcccgaaccatttcagcgcagaagagcgctcatgggtcagcgaacatgtgttatccgcgccctcgccagccgtacgtacgcatctgtgcgtgggatcgctggaaggttcgacggtcccgcaggtcaaacagttgcatgaaaaattgcgcgccgccggcgtcgaaagccattacagcgtgtacaccggcggtcacgattatgcctggtggcgcggcgcgctgattgacggattacgtctactgccccgataaaacttcacctgccaaaaaggaataacatccgatgtatggtcgccagtaccacaacaagcgctatcgcatggcgctatttttagtgagtttttgttttagcgcgctgagttatgcgcagccggatatgcagccattagggccgaatatcgctgataaaggttcgggatattaccatttcagggtcaatgactttcaatctgccgatggcgcaagacattaccgggtatggaccgctatccccaataaagccgccccgccgtcgggttatcctgtcttatatatgctggacggcaacgcagtgatggacagactgccggagacgctgctcaaacagctggcagaccactcgccgccggtgattgtagcgattggctatcagactaacctgccgtttgatcttaacggcagagcttatgactatacgccggcgccgggaatcgatcgcgatgacagtgaaaataacccgcgttttcatcgtaaaaccggcggcgggccagcgttccgccagctactggagagacatatcgcgccgcaggtggaacaaggaataaccatcaactccgaacggcgcggggtatggggacattcttatggcggcctgttcgttttagactcctggctgtcgtcatccttctttcatatctattacagcgccagcccgtcactcagcagggataactttgtcctgttgaatcgccttacgacagtgaagccgtcgctgttctgccataaaaaactcatcataatggaaggttcagcgtcgaatggggatagcaggcaacgccagatggccgagctcctacaaaaagttcaggagaccgtgagaacgcttgagaacaacggcgttaacgcggccctgcagcattacccgggcctgggccacgggcccatgtttaacgcctcttttcgcagtgcattgctggatatcagtcgcgaaccggcaagccaaaaaccacgctgccattaacccgccgccagaatatgcccgccagcggcgggcataatccatcaaaacgaggccgtcacaccggcataataagcccgccccggttcgttataggtatttgccccttcggcggagcgatagatctgtttatcgaagatattgctgataccgacattaagacgcaggttcttattgatatcgtagttaacgttagcgccgaccagtgagtaagcccccagcgctttcccggacaatcctttggtctcttcactacgcgactccgcatgtgttcgcggtttttgcttgccgtataacgtccagttgacgttagcggagagcgcgctggtgatagtccagtcgaggaaggtattcaccgtatatttcgggattatcgataagggattgccggtatctttttgctcagaagcaatcatataagtcgcattggtattccagttcagacggtccggcatcagcggaacagccatgctggcttcaataccttcaatcagcgctttaccgccgttctgccactgcaatacataagcgccagatgcgcttctgccaataatctgatcacctgcgacaatcttattctgataatcgttacggaaatacgttacgcttgcgtgataatcgtctacggtaaattccagcccaatctctttattgatactaatttcaggatcgaggttcttattaccaaccaggtaacagccgcccgacgtaatatcttttggacaaccgttgcctttcgaatagagtaaatacccctcactggtttgatacaagttcggagccttaaaggcacgggcaataccggctttcaccttgacgtattcacctaactcctgggaaaggttaagactgggactaaaattactcccggattcgctcaaatagtcaaaacgcagacccggaataatattggtaccggccataggttcgatattatcttcaacgtacagcgcactgatttccgatttatttttgctgctacggttagccgccgaaccgggaatcccggcgatattgctatccttaaccgtcagactggtagaggaaggatcgttcagctcatcgcggttccactccgcgccgacggtgagcgtttgctcaaatagccatatcaccgggacattcacctcgccgctggtgcgatacgaggtcaggcggttagtggtgaacgtctggtcgttggtaatacgcccctcgccgccgccggagagcccctcattcatgcgggtgttatcggttttttcatagtagaaccccaggcggctttgcccccagtcccagatgccgttatgagttagaccgtaattctgccggtacaggcgattggtctcccgcccggactgcgccagacttttggtaaccgcgtttgaagtactgttttgcgtatcgccagcataaatattcccctgccgactatatcccgcttcaaaatcaaggatttgctgcggggtcattttccatgagaagacgctattaatatctttattggtgaccccctcccgtccggcggcatttttggtaccggcggaggagttaatatcccagctatcggcatcggttctgttgagattaccgtacaggcgcatcgtcaacgtatcaccagccaacggaccgctaaggctaaagttaccccgccgggtgtcaccttctttgctgctttccggctggttggtatagagcgacagcgagccgtgccagtcgttagtcggacgtttggtgatgatattcaccaccccgccagcggcaccggagccatagcgcgcgacggcgggcccacggatcacttcaatacgttctaccatctccggcggtacccagttcgtatcgccacgggtgtcgcgttctccgcgccagctatagcgaaccgaatttcgcgacgtcaccggcacgccgtcaatcagcactaaggtattttccggccccataccacgaatatcaatttgtcggttatttccgcgcgtccccgaggcgctattgccggtaagattaaccccaggcatcttacgaataatatcggcaagatcgttaacgggaggattcttttgaatatcgtcacgagtaataatcgaaacgcccggctgttgctttaatacttgctcggcggtggattcaaccaccatcgtttcgccgttgtcgtcagtagattctgctgctgataatggactattaacccctgtagaaaccacggttattaaccagatgaacttcttaactctcatacccattccctaaataatgtctaaagtagcgctgttgccctcaagctcacatccttgccaggttacgtctatatagtaattattatcatatgctaatgataataattatcattcaattaaggaaaaggcaatctttcgaccacaaaaatctggtaataaaaaaacggaaacgggattttgcaatatgactctctgtccgggctccgctttgccagtaaatccgggaaggggggcagaatgcgcctactgaacggaggttttacaaaacagaaatagataaaataaaactatttttcagatcgttaatcacaagaaacacccaggtaagatggtatagcacggttcagggttcaccgccgcttccctgccgacggcgaaccattcttacagtttgccagcgactttccgtctgggtaatggcgggatcggatacgattgtagccattcgatatttgatgatgaaagtgatgttggcaccaacatacaaagcgcctggtaatatttatcaggcgctttgcagacagaaaaccatcaaacatcagtttctcgttctccaggaactactggaaaatatggcaacccacagttattgggttttactgtcgggtcttgccagggattttgtgttacccccaggtcttttaaaagaccgcgtaacagcactaaatccctgggtgtcattttttgctttggttcaccctctttaggtggacgaatatcctcctgactagtacatgtaacacaataaccttttaactctatccacttaggcttagggggggccttaggatcgggaggcgtcgagctgacaacgcacgaacaggcacttatacatccaggcatagcgttttccttttcaaacaattcgctttagttggaagttctacttgagaaaataggaatggttattcagatatttttaccgtcgcatactcctgtaataataaaagatactgtaaataatttactctcagctactattcagtagcagattgttattcttacattgcttttatttcagatttacgtcaaaaagggctaaatattttcactataaaattcgttaaagagtgtttgtgtgcttgtagacattgtggcgtcttcagtacgcaaatcggttagtgtacaatctttaaaacaggtattgtttaaattagcctcagccaaatcagccccgtccaggttcgtagaaatgaaactcgcctttcgcaggtttgcccgggttaagacagcgccttccataattgcagccattatagtagcaccctgtaatgtcgcaccgctcatatcagcacgtataagggttgcgcctgaaagattagtgtgatccatatttgcaccggagcaattacattctatcatgctacagcctaacagactcgcgtgttgtaaattggcgccagtaagattagcgtgatcgagggtagcgccacacataatgctatcttccagacaggcgttcttgaaattactgtcgcctagtgatgttcccgatagatttgcgcccttaaaatttgcaccttcacaatccgccataaacagcactgccccctctaaatttgcgccgcttaagtctgcgtcacataaattttctgacgtcagatttgctccggtaaggacagcgcctttaagattcatgcctccctgggcagttaatattacagaatcctgagggagagaaaattcgcatctgaatagtaaagctcggcatattttttcaaaagaggcaagcggaatttctcttgtctcagaatggtcgcctttactgactcgtacaataacttgtccagcttcgttattctcaccaggaagattaaattcgacacgacacccatccatatcatccaggatgatgttttctggcaacggagcacctctgtcaggcattgtacttttcaatgtctcagccatagtctctatcaattcctgatattgtgtttcatttctccgacgtatcccaccacaggtaaaaaagttaatgatatattccagaatggttttgggcgaggtagcttgccgcatagcagcagaagtccccgcgccaaaagcagatttagccataccagccagactatcgagtgaacgctccatatattttctcccagagacagcaacacagtgcatgataaaatttatcatatagatttgcatttagagataaggtgaataccccctttacgtctggttacataataacgtatcacgacgcgttgctgtctggcttacacaatagcagccaaataaatatattggcttatactcgtcatacttcaagttgcatgtgctgcggccgcgttccctcaccccagtcacttactttagtaagctcctggggattcgctcgcttgccgccttcctgcaactcgaattatttagagtatataacatcatttaaaataataaacacggcattcgttttaatactacgttctggactcatcccactcattagcagaaaacctattaaaaagcgtgttcaggcattttattaccgccattgataaactgtttaacaacatcgtctgtacagaccttcttcgttgcctttacgtttaactcaatcaggctaccgtctcggttataagtctatcgagtagtagagccgtagtatgacgatgcagcaaagtgatatggaaagatataatccattattaatgttaaaagaagtcatggcgcagacgccttatcgccataaacgctggggagagcgtaagtttcgttataaatttttattacgttgccttattaaccccgtaacgacaattaaatacttcaatgaattatgccatctgtctcagcccagaacgctgattattcatcgtccactgttgccggcaaaaatccagcggccctatttgtataccgggcttagcatacgttgccgggcaaaagctattctggaacactaccagttcgttcagtcctttccggaaagtaaaattaaaaagatcctcctgtccgaggaacaaatcttactcgctcacctggaaggaaaaaacggtgctctggtagatatctactgcggtccctgtggctatgacagagaaggtgaactgacattaacgctgtgcttcaatgatacgccgttggcacgtttatcattttcctttatccgccatgaagggaagcaaatagcgctggttgccgggttacaagggcccagtaaacatatcggcccacaagtcatacgtaacgccaccaaagattgttacggtctctttcctaaacggatgctgtatgaagcatttgcgacattgatgcaggcctgtaatgtcgacgagatttatgcggtcagtgaaaacaaccatgtttatcgtcaactccggtacttattccagaagaaaaaaacttttgtggccagctatagtgaattctgggagtcgctaaacggcgttaagaaaggtgccttatatcatctgccatcacaggtgatgcgtaaagcgcctgaaagtatccccagcaaaaaacgcgcagagtatcggaaacgctatcatattctggatacaataatacaagaggtcaacagcctctcccggtagaactatttcatacgcggatgtgcagatcctgctaccgttcagcggatcttttgaaatctgtatcgctactggatggttaaatacagaatggcttgcgagtgaatagcgcggcattaaaccgtcgctttcactcatgttatgatcaacatcttaatcttattcccttcaccataacgtcatcgattagcatgttaaccattaaatacaagctaaacatttgtcacatttttatttggttaagcaaaaaaataatacaaaatagcattttcagtaagctaagtcaggagttttggtgaaaatacaagaagttaagcgtatattaacccgctggcaaccgtcttccttttccctataccgggaggtgtttacgcaatacggcggtagtatcaatatgcacccagatattgtggattatttcatgaagcgctataactggcattttaaattcttccactataaagaagatgataagattaaaggcgcctactttatctgtaatgatcagaatattggtatcctgacgcgcagaaccttcccgctatcttcagatgagatacttattccgatggcgccagatttacgctgcttcttgcccgatcgtactaaccgactttcggcgttgcatcagccacaaatacgcaatgccatatggaaactcgccagaaagaaacaaaattgtctggtcaaagaaacgttctcttctaagtttgaaaaaacacgccgtaatgaatatcagcggtttcttaaaaaaggcggaagtgtaaaaagcgttgctgattgttcttctgatgaactgactcatatttttatcgagttatttcggtctcgtttcggcaatacttcatcctgctatcccgctgataaccttgccaacttttttagtcaactgcatcaccttctgtttgggcatattctttatattgaagggataccctgtgcatttgatattgtactgaaatctgaaagccagatgaacatctactttgacgtatctaatggtgcaattaaaaatgagtgcaggccactcagtcccggcagcatactaatgtggctaaatattagccgtgccagacattactgccaggaaagacaaaaaaaattgcttttttccatcggcatactaaagcctgaatgggaatataagcgcatgtggtcgaccccctattttaccggaaaatcgatttgctaaaaagaaagcctggacgtaaatatgttttttacgtccagatttttcataaatcctgatgaactgataaaaaacgaaaatttaatcagaatttaaaaaataagttaaccaccatataatcataatgacaattactcgaaattcacttacactatactcggttttatggaattgattaacacggtatgttacagataacgtgctaaaaagcgtgcagcggttatacattttcatatgtgtgtgtcattaacctggcgtcaggaacagatgatgatgacaactacccttttatctcttctggcctggcataccgtcagtagattaaaggagtagccttgctttatggcattacaaaaatgcgggtggggtctatgctcaatgtatacgttatttgtaacaacgctcttgtgcataaacaatacgttattgccaacagcactgaacgggtacagtggttcttgctgacaacaggcttaaagatcgccttaacacgggatacctgataactggattatattatgacacatgcagactggctgattcttgggtatacaactgttattattatttttggtattgtatgttatatcggattgcttaaattgataacgaaaggcaagcatgaaaaataacgcacttaccgggaagaatatactctcaggagataaaatgcttcggcaatgatatgacaccactgccgaaatgctatttttaaagaaatcaatcaggtattgagggtgattttatcatagccgcgccagcgataattcaacaccgagagcagccagaatagcacaaaagcacccactacccagaagcccacattccccatatgatcgttaagcgtgctgacggtctgccaaaatgttccgcttaactgtaacgcatcatcaatcaaccccagcgcctcaagcccgccaatcgccagcgcgacaatgacggatgcggcggtaatggtcatattataataaagcttacgtaatggatgcgagaaagcccaaccgtaagcgccgaccatgacaaagttatccagggaatctaccagcgccatcccggcggtaaacagcacaggaaaaatcatcattgaccagagagatagcccctggttagctgctgaagcggaaatgcccagcaacccaacctcggttgcggtatcaaatcccagaccaaacagaaaaccgacaaaatacatatgccaactggaagtgaccaaacgaaacgtacgctgaaatatacgcgtcatcagcccgccaggtatcgcctcgtcatgcgccctcactgactcgccgcgggtaaccgagcgaaattgccgccagacgttgaacaaaataaacaggttaagcagggccatcgccagcagaaaaaaagcggaaacagccgtaccaatcaacgaaccatattgatgcaaaacatcaatacgatcgcgaaatgccatcgacgtcacaacaatcgccagacatgccagaacgacaatggtcgaatgacccaatgaaaaaaacgcccccacgcctaaaggcgttttaccctgctgcatcagtttacgggtgacggtatcgatggctgcgatatgatcggcatcaaccgcatgacgcagcccaaagctatacgccagtatggctgcgcttagcatgacggcatggtgatgaaaaacacagaacgcccaaatccaggccaggatgttaaccccgacaagaaagacggttaatgctattccccgtcgtttagtatgattattcatgcccctgcacccactatatttttaattaacgctacggtttgtagggggaatgtatgatcatttgattaaaacgtcacacctcaagatgcgactttttgtaaacgtgctttaccgctgacacatttgtccgcattactgcggaacaaggcttaaaaagcgtatccgaacgtataaccctcccaacgcttcgctacgggaaaaatggggatgagtacggtgcaggcgtgcgatatcattgaccaaagccagaccaatgcccgccccggccacatttcctacgttatcgagccggtggaacggctgtagcgccagatggatgtgttcatcatcgatgccgggaccgctatcttcgacaaccagcgtcacggcatcgccatcccgttcaagccgcgcggtgacgatgccttgctcaggcgtgtatttcagcgcattatccagcaagtttccgcatagctcgctaagcagtacctcatccccctcgatccacatcgcttcctgttcgccttcgtagcccaggtcgatatgtttactgcgcgcctgcgccagacgggtaaaacagccgctctgtacgatatcgtacagattcaccggggaaaaacgccgctcgccctgctctttatgctttaccgcagaaagttgcaacaatctttccgtgagctgaatggtgctatccagcgttacgctcatcgcctgcagactttcgtaccagtgatgagggtgctggctggctaacgccaccgccgcctgcgtttttaacaccgccagcggcgtttttaactggtgagaagcatcggcgctaaagcgttcctgccgggagaggatgccgcggagcctgtcaatgtagcgattaaacgccacgattaacaagcgtgtttccgaccacggcagcagttccggcagcggcgttaacagacccggttcgcggcgtaccattaatgacgaaagttgacgcatagggcgcaggatccggcgtaataaccagccaaccagcaccagggtcagcaacaccagcagaccctgtgagatccaggaagagaacagcagttggcccgccagataacgacgggactgcagcgtctctgcgacataaatctccgccatgccgataatgccgccttcgttgaccggctgtagcaaacgcgccacgcggatcgcctcgccgcgatactcggtatgatagaaccacgccagcgccggataaagccgggtacggggcgtagcgggcggcatgacgggcagatcgtcataaccggaaatgacctttccggaagggtcgacgactttgtaatagagtcgatcattcatattaagctcgaagctatccagcaccacccagggcacgttaacttccagatggttattgcgcaccaccagccgttccgataccgttcgcgccgaggagagcaacgtacgatcataagcctgagtggcggcctgtagcgcattgacataactgttaaacgccgacagcccccatagcagaatcagcggcaaccccaggaacagtaagagttgcaggtacaacgattgcggcttaacccacttcatcgccgcgctccagcacataacccaggccgcgcagcgtcgtaattcgtacatcgcttccctgaagttttttacgcagtcgatgaatataaagttcaatgctttcagggcttacctcatcgttcaggctgaacacctgttcaaaaagctgctgacgcgaaactggtcgcgttcgtcggtacatcaatacggttaagagcgcctgctcacgcggcgtcagcgctaacggctgcccctgtaacagaaaatacccttcatcatgaaagatcaattcccccagttgctgaacttcatgaacctgcccagcgctgcgtcggagcaaggcccgtaaacgggcatccagctcttccagttcaaagggtttcggcagatagtcatccgcgccgacgttgagaccttttacgcgatccgccaccgcgcttcgcgccgtgagcagcaaaacgggcaaggtctgaccgcgtttacgcagccgttgcaccacctccagtccatccattcccggcatattgatatccagcaccgccagcgcgtacatttcactgtgcagaagatggtcagccgccaggccgtcaaatacgcagtccacggcaaagccgttttgcaccagcgctttctccagccagtgagccagctcacggttatcttctgccaataagagacgcatatcacatcctgtaaagtttctgccgcattgaaagggaattgaaaggttattgttttaacaatcacgcaaccgaactgctacatgtcggctcacataatcacaaaaatcttcttccgaacctgaaaaatccggacgtccggcgtgaggataaaaaatgaaaaaacaattacttcgtacccttactgcaagcattttattaatgagtacctctgttctggcgcaggaggcgccgtcgcgaacggaatgtatcgcgccagccaaacctggcggcggtttcgacctcacctgtaagctgattcaggtgagtttgctggagactggcgctatcgagaaacccatgcgggtaacgtatatgcccggcggcgtcggcgctgtggcctataacgcgatagtcgcccaacgccctggcgaacccgggactgtggtcgccttttccggcggttcgctgctcaacctgtcgcaggggaaatttggtcgctacggcgtggatgatgtgcgctggctggcaagcgtgggcactgattacggcatgatcgccgtgcgtgcggattctccgtggaaaacgctgaaagatctgatgacggcgatggaaaaagatcccaacagcgtggtcattggcgctggcgcctctattggcagccaggactggatgaagtcggcattgctggcgcaaaaggcgaacgtcgacccgcacaagatgcgctacgttgcctttgagggcggcggcgagccggtgacggcattaatgggcaaccatgttcaggttgtctccggcgatctcagtgaaatggtgccttatctgggcggcgacaaaatccgcgtgcttgccgtcttttcagaaaatcgtctgccgggccagcttgccaatatccctaccgctaaagaacagggctacgacctggtgtggccgattattcgcggcttctacgtcgggcccaaagtcagcgatgccgattaccagtggtgggtggataccttcaagaagctccagcaaaccgacgagtttaaaaagcagcgcgatctgcgcggcctgtttgagttcgacatgaccggccagcagctcgatgactacgtgaaaaaacaggttactgattaccgtgaacaggcgaaagccttcggactcgcgaaataatcgcggaggcaatgatgagcgatcgtatctttgcgggtatctggctgttgctctgtatcgccgggctattcatcgcctggcagatccaaagcgaatacagctatgaacccgtcggcccccgcccttttccgctggggattatcggcctgatggcgctctgcgcgctggcgctgttattgcgccatcccgacacggtgagctggccgcgccgccatgttctgcaaaagctaattaccatgatcatcatcctgttgatgtatgcctggggattcgaatggctgggttttcccatcgccaccgcgcttctcaccatggttatcgggatgctgttcggcgccacgattccggcggcgggtatctccggcgcggtattgggcattctgctgtggtatgcctttgaccggctgcttgatgtcaccttacctctcggcgcctggctgagttaacggagcaacgatggatacctggatatatctttctcagggctttgcggtggcgatgacgccggaaaacctggttatcgcgttgattggctgcttcgtgggcacgatcgtcggtctgctgccgggtctgggaccgatcaacggcgtggcaatcttactgccgctggcctttgcgttgcatctgcctgcggagtcggcgctaattctgctggcgacggtgtacattggctgtgagtatggcggcaggatctcctccatattgctcaacgtccccggcgatgcggcggcgatcatgacggcgctggacggttacccgatggcgcagcaagggaaaggcggcgtagcgctgtcgatttccgcagtcagctcatttttcggttcattaatcgctatcggcggcatcattctgttcgcccctttactggcgcaatggtcgctggcctttgggccggcggaatatttcgccttaatggtttttgccatcgcctgtcttggcagcatgatggcgcaaaacccgcttaaatcatttctggcagcgctgatcggtcttggccttgcgaccgtcggcgtggacgccaacaccggggtttatcgctttacctttgacagcgttcatctttccgacggcgtacagtttatcgtcgtggtgatcggcctgttctcggtatcagaaatacttttaatgctggaacataccagcagcgggcaaacaatggtccgcaaaacgggtcgaatgttgttcaacctgaaagaaggcgcgcagtgtatcggcaccaccctgcgttcttcggtaatcggcttttttgtcggcgtattgcccggcgccggggcgaccattgccagcgccattacctatatgaccgagaaaaaactcagcggcaacagcgatagcttcggcaaaggggatattcgcggcgtcgcggcgccggaggcggcaaacaacgcctctgcctgcggctccttcatcccgatgctgacgctgggcgttcccggttccggcactacggcagtgatgatgggggcgctgacgctgtacaacatcacgccaggcccggcgatgttcaccgaacagccggatatcgtctggggactcatcgctgcgctgctgattgcgaacgtgatgctgctgatcatgaatatcccgttgatcggtctgttcacccgtatgctcaccattccgctgtggttcctggtacccgccatcgctgccgtatcggcggtaggggtgtatgcggtacacagcaccaccttcgatctggtgctgatggtcgcgctcggcgtgttagggtacattttacgtaaaatgcacttccccatgtcaccgctgatcctggggttcgtactgggggaaatgctggagcagaacctgcgtcgcgcactctccatcagtaacggcaatatggcgattttgtggcaaagcggcgttgccaaagccctgctgatcatggcgatcatggtcattgtcgtaccgccagtgttacgtctgctccgtaaacacagccgtaaaccgcaggttgacgccggttaattgactgctgaaatacgttgtacttgtccggcctacgcgctcatgtgtcaggccgggcaaccccgccagcatcactttccccataacgctctcattttacaccccttcttgccgttgtcaggctcgtggcgccgttaacctcaccctttgcattgttaaatatttgttgtttttgatcacaataattaaacaaaagcggttatttcatacgcgttcctggaaaatgtcgatatttttaatttatggctacgaaatgagcatcgccatgtctccctgaccatctaccgagaggaatgattctgatgaatgcactgactgccgtaaaagcgaacacagatgatttagcccaacgccatactggtttcacccttgccccttcggcgcagtcgccgcgcctgctggcgttaacgtttacggcggataccacaaaacaatttcttcatcaggttgcgcagtggccggtgcaggcgctggaatacaaatctttcttacgttttaaaatcggcaagatcctcgacgatctgtgcggcaatcagctacaaccgctgttgatcaaaacgctcctcaaccgtgcacaaggcgcgctgttgatcagcgccgaagggatcgatgatgtcgcacaggcagaagagatggtcaaactggcgacggcggtggcgcatcttattggtcgctccaactacgatgcgatgagcggccagtactacgcgcgtttcgtggtcaaaaacgtcgacaactccgacagttatctgcgccagccccaccgcgtaatggaactgcacaatgacggtacctatgttgaggaggtgaccgactacgtgctgatgatgaaaatcgacgaacagaatatggaaggcggtaattcgctgttgctgcaccttgatgactgggaacatctggagtcgttttttacccatccgctggcgcgtcgcgtcatgcgctgggcggcgccgccaagcaaaaatgttagccatgacgtctggcacccggtgtttgatgtcgaccaacaaggccgcccggtcatgcgttatatcgaccagttcgtccagccaaaagactttgaagaaggcgtctggctcagcgagctttcagacgcgctggaaaccagtcaaaacatcctctccgtaccggtaccggtcggcaaattcctgttgattaacaatctgttctggctacatggacgcgatcgttttacgccgcatcctgacttgcgtcgcgaactgatgcgccagcgcggttacttcgcctacgccgccagccattatcaaactcaccaataagcgccacggcgaaggaattacgcggatgtatgattttgtgattatcggcggcggcattatcggcatgtcgaccgccatgcaacttattgatgtctacccggatgcgcgcatcgcgttgctggaaaaagagtccgcgccagcctgccaccagaccgggcataacagcggcgtgatccatgccggggtgtactacacgcccggcagcctcaaagcgcagttttgtctggcaggcaatcaggcgaccaaaaccttttgcgatcaaaacaacatccgctacgacacctgcggcaaaatgttggtcgccacctcggagctggaaatggcgcggatgcgcgcgctatgggagcggacggcggccaacggcttagagcgcgagtggttaagcgcggcggagctgcgtgaacgcgaacccaatatcattggcctgggcgggatttttgtcccttccagcgggattgtcagctatcgcgatgtcgcgacggccatggcgaaccgctttcaggccaaaggcggcgagatcatctaccatgccgaggtcagcgcgctaacagaacatgccgctggcgttgtcattcgcacctcgcaaggtcgggaaatagaaaccgctacgcttatcggctgtgcaggactgatggcggatcggctggtcaaaatgctgggcgtggagcccggttttattatctgccctttccgcggcgagtactttcgtctggccccgcgacacaaccggatcgttaaccatttgatctacccgatccccgatccggcaatgccgtttctcggcgtccatcttacccgcatgatcgacggcagcgttacggtcgggccgaatgcggtgctggcgcttaaacgcgaaggctaccgtaagcgcgacgtttccttcaccgacaccctggagattttccgctccgccggcattcgccgcgtactgcaaaaccatctgctttccggactgggcgagatgaaaaactcgctgtgcaaaagcggctatttgcggcgagtacaaaagtattgccccagcctgaccgtcaacgatctccagccctggccggcaggcgtgcgggcgcaggcggtttcaccggacggcaaactgattgatgattttctgtttgtcacaacgccgcgttccattcacacctgtaacgccccctccccggcggcgacatccgcgatacctatcggcgcgcatatcgtcagcaaagttcaggcgctacgcgcaagccagagcaaccccggacgtacgctgcgtgcggcacgcagcgtggacgcattacacgccgcatttacccgttaacccttcagacaggaagcaattatgcaacttaacgactctaccctgttccgccagcaggcctttatcgatggcgactggcgcgacgcgcgcggcggcgatgtcatccccgtgagcaaccccgccaacgggaaaccgcttggcaatgtgcccaaaatgggggcggaagagacgcgcgacgccatcaacgccgccaatcgcgccctgcccgcctggcgcgcgctcaccgccaaagagcgagccaatatcctgcgtcgctggttcaatctgatgatggaacatcaggacgatttggcgcgtctgatgacgctggaacagggtaaaccgctggcggaagcgaaaggcgaaattagctacgccgcctcgtttattgaatggttcgccgaagaggggaagcgtatctatggcgacacgattccaggccatcaggccgataaacggctgctggtgattaaacagcccatcggcgtcaccgccgcgattaccccgtggaactttccctcggcaatgatcacccgtaaagccggccccgcgctggccgcaggctgcacaatggtactcaaacccgccagccagacgccgttttccgcgctggcgctggcggaactggcccagcgcgccggaattcccgcaggcgtatttaacgtcgttaccggttcggcaggcgatatcggcggcgagctgaccagcaacccgctggtacgcaaactgtcgtttaccggctcgacggagattggccgccagctaatggaacaatgcgccaaagacattaaaaaagtgtcactggaattgggcggcaatgcgccgtttatcgtctttgacgatgccgatctggataaagccgtcgaaggcgcgctggcttcgaagtttcgcaacgccgggcagacctgtgtctgcgccaatagattgtatgttcaggacggcgtttacgatcgttttgcggaaaaactcaaccaggcggtaaataagctcgcggtcggtgacggcctgcaagccgacgtcgctatcgggccgctgattgatgaaaaagccgtggcgaaagtccaggaacatatcgccgatgcgctggaaaaaggcgcccgcgtcattacgggcggtgaagcgcacaaattgggcggcaacttctttcaaccgaccattctggcggatgttcctgataacgcgaaagtcgccaaagaagagacattcgggccgctcgcgcctctgttccgcttcagcgacgaggcggacgtcatcaggcaggctaacgataccgagttcggcctggcagcctatttttatgcacgcgatttaagccgcgttttccgcgtcggcgaagcgctggaatacggcatcgtcggtattaataccggcattatctccaacgaagtcgcgcctttcggcggcattaaggcctccggattaggccgagaaggttccaaatacggcatcgaagattatttagaaatcaaatatatgtgcatcggcctttaacaggagagtcgctaatgaataccaataacgctttaatgcagcgccgtcataacgccgttcctcgcggcgtggggcagattcacccgattttcgccgagcgggcggaaaattgtcgggtgtgggatgtcgaaggccgtgagtatctcgatttcgcgggcggcattgccgtcctgaacaccggtcatttacatccgggcattgtttcagcggtcgaagcgcagttgaagaaattgtcccatacctgttttcaggtgctggcctatgaaccgtatctggcgttgtgcgaacgcatgaaccagaaggtaccgggcgatttcgccaaaaaaacgttgctggtcacgaccggttcagaagcggttgaaaacgcggtgaaaatcgcccgcgcggcgacaaaacgcagcggcgctatcgcgtttagcggcgcttaccacggtcgtacccactacacgctctctctgaccgggaaagtacacccgtactctgctggtatgggattgatgccaggccatgtctaccgcgcgctttatccttgcccgctacacaacatcagcgacgacgacgcgatcgccagcattgaacgcatctttaaaaatgatgccgcgccggaagatatcgccgccattattattgagccggtacagggcgaaggcggattttacgccgcctctcccgcgtttatgcagcgactgcgcgcgctatgcgaccaacacggcattatgttgattgccgacgaagtgcaaagcggcgcgggccggaccggtacgctgttcgccatggaacagatgggcgttgcggcagatattaccacgtttgcgaaatcgatcgccggcggctttccgctggcaggcgttaccggccgggcagacgtgatggacgctatcgcgccgggcgggctgggcggcacctatgccggaaacccgattgcctgcgccgccgcgctggcggtactggacattttcgagcaggaaaatctactgcaaaaggcgaatacgcttggcaaaacgctgcgcgatggcctgatggagatagcggaaacgcaccgtgagattggcgacgtgcgcggactgggcgccatgatcgccattgagttgttcgaaaatggcgaccccggcaaaccgaacgcggctctgaccgccgacattgtgacccgcgcccgcgagaaagggttaattctgctctcctgcggtccttactacaacatcttgcgcatcctcgttccactcactattgaggcctcgcagattcggcaaggcctggagattatcgcccagtgctttgatgaggcgaaacaagcgtaatgtccaataagcagcgtcgggtggcgacgtaactgtcttatccggcctacaaaaaccgtttcgattgtaggccgaataagccaggcgccatccggtaaacgagcgcaataacaataaagaggttttaggatggggcaattgtcagaatcacatgcattagggggcgggctgaaatcacgccacgtcaccatgttatcgatcgccggcgtcatcggcgccagcctgtttgtcggttccagcgtggcgattgcggaggccggccctgcggtactgctggcctatctgttcgcaggacttttagtcgtcatgattatgcgaatgctggctgaaatggccgtcgccacaccggataccggatctttttccacctatgcggataaagcgatcggcccctgggccgggtataccatcggctggttatactggtggttttgggtgctggttattccgctggaggccaatattgccgccattattctgaattcatggataccgggtattccggtatggctattttcattagtgattacgcttgccttaaccggaagcaatttattgagcgtcaaaaattacggcgagttcgaattctggctggcgctatgtaaagtaattgccattctggcgtttatcgcgctgggcgcgacggcgattagcggtttttatccgtatgctgaggtaagcggtatctcccggctctgggatcacggcggttttatgcctaacggcttcggcgcggtgttaagcgccatgttgatcaccatgttctcttttatgggcgcggaaatcgttactattgctgccgcggaatccgatacgccggataaacatatcgtacgcgccaccaattctgttatctggcgaatttccatcttttacctgtgttccatttttgtggtggtggcgctgatcccgtggaatatgccgggtctgaaaagcgtaggttcgtaccgttcggtactggagctgcttcatattccgcacgcaaaattcattatggactgcgtgattttattgtcggtgaccagttgtctgaactccgcattatataccgcctcccggatgctctattcccttagccgccgcggcgatgctcctgcgataatgggaaaaactaaccgtagcaaaacgccctgggtagcggttctcctctctaccggcgcggcctttttaaccgttatcgtcaattattacgccccggcaaaagtgtttaaatttcttatcgacagttccggcgccatcgcgctgctggtctatctggtgattgcgatttcgcaattgcgaatgcgtaaaattctgctggcgcagggcggagaaattaagctgaaaatgtggctttatccgtggctcacctggctggttatcggctttatctgctttgtcctggtggtgatgctatttcgaccggcacagcaactagaagtcatttcaacggggctgttagggctgggcataataggtactgtccccattatgtctcgctggaaaaaactgataaggtggcaaaaagcccccctgcaaaacctacgttagttattcccggcgtcagccgggaagcttctcaggagtaaaagatgaccgccctttcccaaccgacggccatagatggctatcgctggcttaaaaatgacattattcgcggcacttatcagccggatgagaaactgcggatgagtttattaaccgcccgctatgcgctcggcgtagggccgctgcgtgaggcgctgtcgcaactggtggcggaacggctggtcaccgtggtgaatcaaaaaggctatcgcgtggcatccatgtcagaggcggaactcctcgatatttttgacgcgcgcgccaatatggaagcgatgctggtacgcctggcgattgaacgcggcgatgatgcgtgggaggcggagatcctggcgcgagcgcatatgctcagcaaactggaagccagcgatgccagtgaacatatgctcgatgaatgggatcagcgccaccaggcgttccattccgccattgtcgccgggtgcggctcccactatctgctacagatgcgcgaacgcttatttgacctggcggcccgctaccgctttatttggttacgtgaaaccgttctgtccgtcgagatgctggaagataaacatatccagcatcacacgctaaccgaagcgatactggcgcgcgaggcggcacgcgccagcgaattaatgcgtcagcatttgctgacgccgattcccattattcgccaggcgatggcagggaaaatgtagcctggcgcgacctgatagccattattcttcaggaatacgcaacacttgtcccggatatattttttccgggcttttcagcatcggtttatttgcctcgaaaattttattatacagattggcgttaccatacacttgctttgaaatagcgctcagggtgtcgcctgattttacggtataaaactgactttcagccgccggcgtcgtggttttaacctgatcgtcaacgctgctaatcccggcgatattccccacggcaaccagaattttttcttttgcctcctgactcagcccatcacccgtcactgtcgcttttccatcagctatttgcacattcactttgtcagcgtcgggtattcccgttttatttaaatgttcctggacttttttcgcctgatcgtccttatcatgattagcggttaccgcgtcccagagtttttcacctgcatcttttacaaaattgaaaagtcccatattcacctcgcttgtcaaaaatacacacaaagaaaagtgtagcagagggaatgaggttatcctgataagcggcgcttatgcgccgccggtggccggtaattaatgacgcatctgaacccaaaatgcgtggataagccccggaatatatccgagtaatgtcagcaggatattaaggataaatgcccaaccgaacccttttcctaaaagtacgccgagcggaggcaaaataatcgtaaatacaattctccagaaacccatatacactccatacaagcaaaattagtcattgtttaaaaagagattttatctctaagcatagtcagtttacctgagcctgccagtcgcgcgccgcgcttttaccctcctttacgctctttacgctggcattaggttgatgtttattttagaattaactaaatttagaaaatacttaaataactatgacagagcttgaacaacttcaggccagcgcagaacaggcggcggccctgctcaaagcgatgagccacccaaaaagattactgattttatgtatgctttgcggttcgccaaaaaccagcgcaggcgaactggcgcgcattaccgggctaagcccctccgcgacgtcgcaacatctggcgcggatgcgggaagaagggctgattgatagtcaacgcgatgcccagcgcattcactatttcattaaaaatgaggcggttaatacgattatcgccacgttaaagaatctctattgtccataaggaggcacgatgtccattgggatagtttccccccgtgaggcgcaagcgctgatagcgcaaggcgcgaaactgattgatgtgcgcgacgccgatgaatatctgcgcgagcatattccacatgcgcaactggcgccgctctcccggcttgaacagggcgatttgcccgccaacctgcgagcggaacagattatttttcactgtcagtcaggtaaacgaaccagcagcaatgcagcaaaactacaggccattgccgcccctgctcaggtcagtctactggaaggcggtatcgacggatggaaagcggcaggattgcccgtcacagaagacaaatcgcaaccgttgccgctgatgcgtcaggtgcaaatcgccgccggcgggttggcgttgcttggggttattatgggctatacggtccacggcggctttttcctcattagcggttttgtcggggccgggttaatgctggcaggcatgaccggcttctgcggaatggcgcgactactggaaaaaatgccctggaatacccgtactcattaagcggtaccttcaccacgcgtcggtaagtgtgtagtagactgaaggcgggtttataccattgttcaacaggagggcgtgatgttcacaccaggcgatatcgtacagccccgaatgggtgggccgaaactgaaagtgattgaagtcaacgaggatcatattgtcgcggtacaggtcggtaatgaaccgggcgaaaaattgatcctcaaagcggcagatgtcaccccctattgcgaagagggcgattttggcgtgtgctgatttatcaaaatgagcatggcgcaacgttccctgagtcccggttaatagagacaggaaacgaagcgccatctgttaaaagctatccgtgattagattaagaaatcatccagagatttccccgccgccagcgcctgggcaatcggtttaggcgtacgaccttgtccggtccaggttttttcttcgccattgaaatcagtaaaacgatattttgccggacgcggctggcgctttttagcagaacgcggcattgctgaatccatggcaaataactcttccgggttaataccgtctgctttcatcagctccagaaaggcattaattttctcctgcttctcggcaagctggcgttgctgcaattcttcttcttcgcgtctttctttagtgacaaccctgaatttttcgagcatttcttcaagaacgtcaatggagaattcgcgagccatagcgcgcagcgtgcggatattatttaagttctgtaacatcaaattcatatcaataaaaaccttttaacgcagaaaacaaaaaactattacaggcggtattgtatgcgattgttgattatatttccagatcctaaagttcatacagatatacacagcataactcgattaattatattaatctgttaaccagaaggttatattcattaccccctgcgtgtttcaggttattctgcctacggtatatctgtaggtttcccgtttggctgtttatagcgtattgcgtatctcagtaaccgcggtgaccctcacggtggctgaccttatacagaagtgaatatttcagcacaataagagattaaccattcaaaaatcatcatcagagctttatgctaaaaatcagtctgcaatggctataattatgctgagaaaagtagagcgcatgccgttagccgagaatacatcgcatctgacaacatttggaatgtggctgaaaatcgccagaaaaacaatgcattataatgcattgatttaaaagtaattaatgactaacaacaacgaaaatctcgccgcgagcaaaaaacacacaatcacagagtattttatcgacaaaaagcctataaataaaaatattacactagttgatagttattatatagggatatactctatgcaaagacaaaagtgctttatgatttcactaccaaccatcacctcattctgatcgatacgctacaaggagcattaacatgttctctccacagtcacgcttgcgtcatgccgtagcagacacgtttgcgatggttgtttactgttctgttgtgaacatgttgatcgagatattcctctccggaatgagctttgagcagtcgctttcttccaggctggtggcgatacctgtcaacattttgattgcatggccatacggcgtttaccgcgatctgattatgcgcgtcgcgcgtaaggcaagcccggcgggatgggccaaaaacctggcggatgtattggcttatgtcacctttcagtcacccgtttatattatcatcttgctgaccgtcggtgccggctggcatcagatagtggccgccgtgagttcaaacattgttgtttcaatgttaatgggcgcggtttatggctacttcctggattattgtcgccgcctgtttaaagtgagcagctatcatcaggctaaggcgtaagttagcgtcgcgactggcattgccagtcgcgcttttagtcggttttttcgtcgccaaaaagcccattcagataacgttctaacgctattcgggagctaaagccgtggggaataccgtaatgttcgtgggtctcgccgcctaaatagagcggaaagttttggtaatgatcgcaggttttaatatccgaagccgggtcagccagtgatgagctacggtcttttaatctggggtgaatgatcagcgcggtacgccccatacgcgcctcgcggttaacataaacataattctcgccgcgtcgataaccatacgtcttattcgtcaccacatcgacggtaaaccctgccttttccagtacccgcgccacctcgtcaggtcgtaaatacatattttatcctcattctcttgtactgcgggcttaccttacccgatagcgcgttatcaacgctttcagaaaagtccagaaacgcatgatatcgccgtaacaagcctcagcaggtaaaaatatgaactacactgaaagctacatcgaaatcaatggaggatcatatgcttaacaaaccgaaccgaaacgacgtcgatgatggtgttcaggatattcagaatgatgtcaatcgattagccgacagtctggaagatgtccttaaatcctggggaagcgatgcgaaagacgaagccgaggctgcgcgacgtaaagcacaggcgttgctgaaagagacccgggcgcggatgcagggtcgtactcgcgtaaaacaagccgcctgtgatgcgatggggtgcgcggatacgtttgtgcgtgaaaaaccctggtgtagcgtaggaaccgccgcagcggtggggatttttatcggggcgctgcttagcctgcgtcgctaacgacgtgcgctgccggatggcgacatactttatggggcctgcatcattgccgcaggcccaggtcgcgccattcggcgaaacggttactgtatcgcctgtcgaagctgacatgcgacctgtttcgccatgccagcggaagtaatattggtaaacgacagtaaaatgcccccctttcctgacgaaaccactcgccaacggcttagcgcctgtaccgccagtccggcctgattcgcttttgctacctgcgctttatcatcaccttcaacctcaataaccaattgaataccgcctttctgtaatgtcacgacaaatccctgttctgccagcgcctcttcaatccataaccgtcgctgagcataatgttgacgcatctttttcagatgccgccagaaatggccatcacggataaaatcagccagcgtgtgctgccataacaacggtacgctacagggcatcagcgacgcctgctggcggaaatgctcaatctgctttatcggcaccaccagccaggcggtacgtaatgccggaaagagcgacttactgaacgttccggcgtaaatcactcgctgcggggcatccagactcttgagcggcggaagtggtttaccgtgataacgaaattcgctgtcgtaatcatcttcaataatccaggcctgcacattcgccgcccatgccagaagttgccgtcggcgagttaacgacagcgccacccccaacggactttggtgggcgggcgtcaccaatgcaaagcgcccctgcgggcaatcccgcatccccgccgcgacattcagcccatcggcatcgaccggaatcggcgccagcgtaatcccctcctgcgttatcaccgggcgaattaacggaaagccgggatcttccacccacatgctgtctcccggcacagacaatgtacgcaggattagccgcatagaatccgcataaccggaggtaataaatacctgttccggcagacattcaatgctacgcgaaacccgcaggtaatcgactatcgcctggcgcaaaatcgcctcgccgcagacgtcgcctaatgccagatcgaagcatgtctgcgtgcgcaaccgacgccccattactcgcgcccacttctcgcgtggaaagagatccagcgccggtaaccccatctgaaagggtttcggttccggactttctccggcaaaaacagcgggtatcggcggcgccgtctcaaaccgtagagcgttgctcacaaacgtgcctgcctggccacgtcgctccagccagccctgcgccaccagctcgccataggcattttccaccgtggcgcgagaaacgcccagttcctgcgcccacgtcctactggaaggcaaacgcgttccgggcgcgagttctccttgctcaatggccgtttttaactgacgagcgatgtgctgatagcgcggcatatggtctgctttttctgtaaaaatatggctctcttttacagaccattatagtgctacagtgctcgtcatcaacacgaggagaaacatgatgacaacgttacgccaaccctattatgaactgagcccggaggtttacagcgctctggtgcaggcgaaaaacgcgctggaaaagagcacgcttgaccccacgctgatggagctgatttacctacgtgtttcgcaaataaatggttgtgcattttgcctggagatgcacagtaaagcgctgcgtaaggctggcgtgaatcaagctaaattagatgcgctggcaggatggcgggtaagtcaccatttcagcgagcaagagtgcgcggcgttagcctgggcggaatcggtgacgcacattgctgaaacccacgccgaagataatatttacctgccgctgctcgatcatttcagcgcgcgtgaaatcagcgatctgaccttcgccatcggtttaatgaactgctttaaccgtctggcgatcggtatgcgaatgtgacgcattgttgccggatggcgctgatgtcagccaactctgttatgcgtgaacctgcaggccggatcgggcgttcacgccgccatccggcaaaaattagccatgcctcccctaccccgcggcgttcatcagcggcgttaaaatcaatcgaaaattcccatatcttgtatggttgaatcttaattcaactacatctagtatttcctgtatcaacacacgacaatccgacgcgtttcatcgcgccgttttctcattttaaatggaaatacgaatcatgagcattactatttacactcgcaataactgtgttcagtgccacgccacaaagcgggcgatggaaagccgtggatttgaatttgagatggtgaacgtcgatctggtgccggatgcagcggatacgctccgggcgcaaggatttcgtcaattaccggtggtgatggcgggcgatttgagctggtctggcttccgcccggacatgattaaccgtctgcacccgacaccccacgcggcaaacgcatgagcgcgctcgtctacttctccagcagctctgaaaatacgcaccgctttatgcagcgtctggggctgcctgccacgcgtattccgctcaatgagcgggagcgaattcaggtagacgaaccgtacattctggttgtgccgtcatacggcggcggcgggatggccggtgcggtgccgcgacaggtgatccgctttttaaatgatgaacacaaccgggcgcgcattcgcggcgttatcgcctccggtaatcgcaatttcggcgatgcctggggatgcgctggcgatgtgatagcacaaaaatgcggcgtcccctggctgtaccgctttgagctcatgggcacacaacgcgacatcgataatgtccgaaaaggagtaaatgaattttggcaacaactaccccggagcgcgtaatgcaggaaaccatggattaccacgccctgaacgcgatgctgaatctttacgataaagcaggccatattcagttcgacaaggaccagcaggcgatcgacgccttctttgccacccacgtccgcccgcattccgtgacgtttgccagccagcatgaacgtctggggacgctggttcgggaagggtattacgatgacgccgtcctcgcgcgttacgaccgcgccttcgtccttcgcctgttcgagcacgcccatgccagcggctttcgcttccagacgtttcttggcgcctggaagttctataccagttacacgctgaaaaccttcgacggcaaacgttatctggaacactttgaagatcgggtgacaatggtggcgttgacgctggcgcagggtgacgaaacgctggccacccaactgaccgatgaaatgctttctggtcgctttcagcccgctaccccgacttttttaaattgcggcaaacagcagcgtggggaactggtctcctgcttcctgctccgtatcgaagacaacatggagtcgatcgggcgggcggtgaattcggcgctgcaactctccaaacgcggcggcggcgtcgcgtttttactctccaatctgcgcgaggcgggcgcgccgatcaaacgcattgagaatcagtcttccggcgtgatcccggtgatgaaaatgctggaagacgcgttttcgtatgccaaccaacttggcgcgcgccagggggccggcgcggtttatctccatgcgcaccatccggatattctgcgttttctggataccaaacgagaaaacgctgacgaaaaaatccggatcaaaacgctctctctcggcgtggtgatcccggatatcaccttccggctggcgaaagaaaacgcgcaaatggcgctcttttcgccctatgacatacaacgacgctacggcaaaccgtttggcgatatcgccattagcgaacggtacgatgaattaattgccgatccgcacgtgcgcaaaacctatattaacgcccgtgacttttttcaaacactggcggagattcagttcgaatccgggtatccctacatcatgtttgaagatacggtaaaccgcgcgaatcccattgctggtcgcattaatatgagcaacctgtgctcagaaattttacaggtcaatagcgcttcccgttacgacgataaccttgactatacccacatcgggcatgacatctcctgcaatctcggctcgctgaatatcgctcacgtcatggattcaccggacattggccgtaccgtagaaaccgctattcgcggcctgacggcggtgtcggacatgagccatatacgcagcgtgccctcaatagccgccggtaatgccgcctctcatgccatcggtctgggccagatgaatctgcatggctatctggcgagggaaggtattgcctacggttcgccggaggcgttggatttcaccaatctctatttttacaccattacctggcatgccgtgcatacttcaatgcggctagcccgcgaacgcggcaaaaccttcgccggatttgcgcagtcgcgctatgccagcggcgactattttacgcagtatttacaggacgactggcaaccgaaaacagcgaaagtcagggcgctatttgcccgcagcggcattacgctgcccacacgagaaatgtggctaaagctgcgcgacgatgtgatgcgctatggcatctataaccaaaatttgcaggcggtgccgccgaccggttcgatttcttacattaatcatgcgacctccagcattcatccgattgtggccaaaattgagattcgcaaagagggcaaaaccgggcgtgtgtattaccccgcgccgtttatgaccaatgaaaacctggacatgtatcaggatgcttacgatatcggtccggaaaaaattattgatacctatgccgaggccacgcgccacgtcgatcaagggctgtcgctcaccctgtttttccccgataccgccacgacccgcgatatcaacaaggcgcagatctatgcctggcgaaaaggtattaagtccctgtattacatccggcttcgccagttggcgctggaaggtactgaaattgaaggctgcgtatcctgcgcgctataaggaaagccatatgaaattatctcgtattagcgccatcaactggaacaagatccaggacgacaaagatctggaggtatggaaccggctgaccagtaacttctggctgccggaaaaagtgccgttatcgaatgatattccggcctggcagacgctgagcgccgccgaacagcagctcaccattcgcgtgtttacgggacttacgctgctcgacactatccagaacatcgcaggcgcgccgtcgttaatggcagatgccatcacgccgcatgaagaggcagtgctgtcgaacatcagctttatggaagcggtacacgcccgctcttacagttctattttctccacgctgtgccagacgaaagaggttgatgccgcctacgcctggagcgaagaaaacccaccgcttcagcgtaaggcgcagattattttagctcattacgtcagcgatgaaccgctaaagaaaaagattgccagcgtctttttagagtcttttctgttctattccggcttctggttgccgatgtatttctccagccgcggtaagctcacgaacactgccgacctgattcgtttaatcattcgcgatgaagcggttcacggttattatattggctataagtatcagatagcgctacaaaaactatcggcaatcgagcgtgaagagttaaagcttttcgcgctggatttgttgatggaactgtacgacaacgaaatccgctacacagaagcgttatatgcggaaaccggctgggttaacgacgtcaaagccttcttgtgctacaacgccaataaagccttaatgaacctgggttatgaggcgttatttccgccggagatggcagacgtgaatcccgcaatccttgccgcgctctcgccgaatgccgacgaaaaccatgatttcttttccggctcaggttcatcttatgtgatggggaaaacagtcgaaaccgaagacgaagactggaatttttaaccttacgggcatgggaaataacgttacatttcccatgcctttatttcaagcaatagggagtcaaatcgcgcaaatattacaacatgtcctacactcaatacgagtgacattattcacctggattcccccaattcaggtggatttttgctggttgttccaaaaaatatctcttcctccccattcgcgttcagcccttatatcatgggaaatcacagccgatagcacctcgcaatattcatgccagaagcaaattcagggttgtctcagattctgagtatgttagggtagaaaaaggtaactatttctatcaggtaacatatcgacataagtaaataacaggaatcattctattgcatggcaattaaattagaagtgaagaatctgtataaaatatttggagagcatccgcagcgtgccttcaaatatattgaaaagggactatcgaaagagcaaatactggaaaaaacggggctatcgcttggcgttaaagacgccagtctggccattgaagaaggcgagatatttgtcatcatgggattatccggctcgggtaaatccacaatggtacgccttctcaatcgcctgattgaacccacccgcggacaggtactgattgacggcgttgatattgccaaaatatcagacgctgagcttcgcgaggtgcgcaggaaaaagattgcgatggtcttccagtcatttgcgctcatgccgcatatgaccgtgctggataatacggcattcggtatggaattagcgggcatcgcggcgcaagagcgtcgcgaaaaagcgctggacgccttgcgtcaggtggggcttgagaattacgctcacgcctacccggatgaactttccggtgggatgcgtcagcgtgttgggcttgcccgcgcgctggcaatcaaccctgatatcttattaatggatgaagcgttttccgccctcgatccattaattcgtaccgaaatgcaggatgagctggtgaaattacaggcgaaacatcagcgcaccattgtctttatttcccacgatcttgatgaggctatgcgtattggcgacaggattgccattatgcaaaatggcgaggtcgtacaggttggtacgccggatgagatcctgaataatccggcaaatgattatgtccgcacgttcttccgtggcgtggatattagtcaggtctttagcgccaaagatattgcccgtcgcagcccggtcggattaattcgtaaaacgccaggtttcggtccccgttcggcactgaaattattacaggacgaagaccgtgaatatggttacgtcattgagcgtggcaataaattcgtgggcgtcgtgtccatcgactcattaaaagcggcattaagccaggcgcaagggattgaagcggcgcttatcgacgaccctttagtcgttgatgcgcaaaccccactcagcgagttgctctctcacgtcggccaggcgccctgcgcggtgccggttgtcgatgaagaacaccagtatgttggcattatttcaaaacgtatgttgctacaggctttagatcgcgaggggggtaacaatggctgatcaaacgaatccgtgggataccgcacaggtggccgatactacgacgcaaacggctgatgcctggggaacaccggcaggcgtagccacggacggcggcagtaccgactggttgaacagcgcgcccgcgccagcccctgaacacttttctcttctggacccgttccataagacgctgatcccgctggatagctgggtcacagagggaatcgactgggtcgtcacccatttccgtcccctttttcaggggattcgtgtgccggtggattacatcctcaacggctttcagcaactgctgctgggaatgcccgcccctgtggcgattattctctttgcgctgattgcctggcaggtttccggcgtgggcatggggatcgcgacgctgatatcgctgatcgccatcggcgcgatcggcgcctggtcgcaggcgatgattaccctggcgctggtattgaccgccctgttgttctgcgtcgtgatcggattaccgatgggaatctggctggcgcgcagcccgcgcgcagccaaaatagttcgtccgctgctggatgcgatgcagaccacgcccgcgtttgtctatctggtgccgattgtcatgttattcggcatcggtaacgtgccgggcgtggtggtgacgattatttttgctctaccgccgattgtacgcctgacgatcctgggcattaaccaggtgcctgccgacttaattgaagcgtcgcgctcgttcggcgccagcccgcgccaaatgttgttcaaagtgcaactaccgctggcgatgcccaccattatggcaggcgttaatcagacgctgatgctggctctctcgatggtcgtcatcgcctcgatgattgcggtcggcggacttggccagatggtactacgcggcattggtcgtcttgatatggggctggcaaccgtcggcggcgtcggcattgtgattcttgccatcattctggaccgtctgacgcaggccgtcgggcgcgactcgcgtagccgcggtaaccgtcgctggtataccaccggtcctgttgggctaatcacccgccctttcgttaagtaactctcctgacgcccggtgacattgcgcttaccgggcttacaactccctaccataattaaaggaacaacgatgcgacataccgtgatatttgcctcagcgtttgccacccttgtcaccgccagcgctttcgctgccgacctgcctggcaaaggcattaccgtccaacctatccaaagcacgatttctgaagagaccttccagacgttactggtcagtcgggcgctggaaaagttgggttataccgtaaataagccgagtgaagtcgattacaacgtaggctacacctccatcgcctctggcgatgcgacgtttaccgccgtgaactggcaaccgctgcatgatgatatgtatgccgcagcaggcggagacaacaagttttaccgcgagggcgtcttcgtctccggcgctgcgcagggctatctgatcgataaaaaaaccgccgagcagtacaacatcaccaatatcgctcagctaaaagatccgaaaatcgccaaaatcttcgatactaatggcgacggaaaagcggacatgatgggctgctcgccgggctggggctgcgaagccgtaatcaatcaccagaataaagcgtttgatttgcaaaaaaccgttgaggtcagccacggtaactatgcggcgatgatggctgataccattacccgttttaaagaaggcaagccggtgctgtattacacctggaccccgtactgggtgagcgatgtaatgaagccgggtaaagatgtcgtctggctacaggtgccgttctcctccctgccaggcgaacagaaaaatattgatactaaactgccgaacggcgcgaactatgggttcccggttaataccatgcatattgtcgccaataaggcatgggcggagaaaaatccggcggcggcgaaactgttcgccatcatgaagctgccgctggcggatatcaacgcgcagaacgccatgatgcatgccggtaaatcgtctgaagccgatgttcagggccacgtagacggctggatcaacgcccaccagcagcagtttgacggctgggtgaaagaagcgctggccgcgcagaaataagatcgttttttatgccggataaggcgcagttcatgcgccgctatccggccaacgcaatctctcctcaaagcgcacgattcatcacgtcaccgttcccctttattcatcaacatccgctatgattgttttcccaggaaataattatctgaatcacgattaccataatgacgaaacccactcatgagcttagcccggcgctgatcgttttaatgtctgtggccacgggtctggcggtcgccagcaactactatgcccagccgctgcttgataccatcgcgcatcacttttcgctttccgccagctccgcagggtttatcgttaccgccgcgcagttgggctatgccgctggcctgttgtttctggtgccgctcggcgacatgtttgaacgccgaacgctgattgtctccatgacgttgctggcggctggcggaatgctgatcaccgccagcagtcagtcgcttagcatgatgatactcggaacggccttaaccggactgttctccgtggtggcgcagattctggttccgctggccgccacacttgcgacgcccgccacccgcggtaaagtggtcggcaccattatgagcggcctgttgctggggatcctgctggcgcgaacggtcgccggactgctggcaaacctcggcggttggcgcaccgtattttgggtagcgtcggcgctgatggcgctgatggccgtcgcgttatggcgcggactgccaaagctcaaatccgacacccatcttaactacccgcaactgttgggttctgtattcagcctgtttattcacgataagctgctgcgtacccgcgcactgctgggctgtctgacctttgctaatttcagcatcctctggacatcaatggcctttttgctcgccgcgccgccgtttagctactccgaggggatgattggcctgtttggcctggcgggggccgccggcgctttaggcgcgcgtccggctggcggatttgccgataaaggtaaatctcacctcaccaccacgttcggcttactgctgctgttactctcctggctggctatctggcttgggcacacctcggtactggcgctgattattggcattctggtactggacctcaccgttcagggggtacatatcaccaatcagacggtcatctatcgtttgcatccggatgcgcgtaaccggctcaccgccggctatatgaccagctactttatcggtggcgccgcggggtcgctgatttccgcctccgcctggcaacatgccggctgggccggcgtttgtctggcgggtgtcacggtagccttacttaatttactggtctggtggcgaggttttcaccgacaggaagccgtaaattaagcggatagtgagcgtttacctttgtttaagctccttagggtgttaaggagctccccagtctgttaaggttatgctattcatttatcatggttatttttataccggtgaagaataatataattctatggaaagccctgcatccccatctgctcccaggccaatagcgcccgttcaaggattcgaaggtcgttcaccgatagctatccgtgatattccggtggcttttgcatcgggttgtaaggccgtttacccggctttcgcccctcccgcttatcgttctctcctgattttttcatgcaggcactcacgcttttctcgtcattcctggatttgccgcaggcggcgctttaccgggcccaatgttcccgctgacgtctcagtctgcgtatcattggttgctttatagcctgaaagaatgattttgtattaataatacatttactttatttgtcactgtcgttactatatcggctgaaattaatgaggtcatgcccaaatggatagttcgtttacgcccattgaacaaatgctaaaatttcgcgccagccgtcacgaagactttccttatcaggaaattcttttgactcgtctttgtatgcacatgcaaggcaagctcctggaaaaccgcaataagatgctgaaggctcaagggattaacgagacgttgtttatggcgttgattacgctggagtctcaggaaaaccacagtattcagccgtctgaattaagctgcgcgctgggttcatctcgcaccaatgcgacacgcattgcagatgagctggaaaaacgcggctggattgagcgtcgtgagagcgataacgaccgccgttgcctgcatctgcaattaacggagaaaggccaggcatttttgcaagaagtgcttccgcctcagcatcattgtctgcatcaactctggtcatcacttagcacagccgaaaaagatcaacttgagcacatcactcgtaaactcctgacgcgtcttgatcaaatggagcaggaaggcactgttcttgaggcgctgcgctaaagcgccgacccgctcaaaaatccagattaataacaggaaagcggacaggccggcacgcgttactgctggcctttctgacaacaggtcggctcagccgatgtgaataataagatcgtggagaacaacatgagcgcaaatgcggagatccaaaccccgcagcaaccggctaagaagaaaggcaaacgcaaaacagcgctgctacttcttaccttgctctttgttattattgccgtggcatatggaatttattggtttttagtattgcgtcatattgaagagacagatgatgcttacgtggcagggaaccaggttcaaatcatggcgcaggtgtcaggcagcgtgacgaaagtctgggctgataacaccgactttgtaaaagagggcgatgttctggtcacgctcgatcagactgacgccaaacaagcgtttgaaaaagccaaaacggcgctggcctccagtgtgcgccagacgcaccagttgatgattaacagcaagcagttgcaggcgaatatcgacgtgcaaaaaaccgccctggcgcaagcgcaaagcgaccttaaccgtcgtgtgccgctgggtaatgccaatcttattggccgggaagagctgcaacacgcccgcgatgccgtcgccagcgcgcaggcacagctggatgtcgccattcaacagtacaatgccaaccaggcaatgatactcaacagtaatctggaagatcagcccgcggttcaacaagcggcgaccgaagtgcgtaacgcctggctggcgctggagcgtactcgcatcgtcagcccaatgactggttatgtctcccgccgcgccgtccagcctggcgcgcaaatcagccccaccacgccgctgatggccgtggtgcctgcaaccgatctgtgggtggacgctaactttaaagaaacccaattagcgaatatgcgcattgggcagccagtgacggtgattactgatatttatggcgacgacgtaaaatacaccggtaaagtcgtcggtctggatatgggaacaggcagcgccttctccctgctgcccgcgcaaaatgcgacgggtaactggattaaagtggttcaacgtctgccggtacgcgtcgaactggacgcccgccagttagaacaacatccgctgcgtattggtttatcgacgctggtcaccgtggataccgctaatcgcgacggtcaggtactggccagccaggtacgaacgacgccggttgccgaaagtaacgcacgcgaaattaatctcgcgccggtcaataaactgatcgacgacatcgtacaggctaacgcgggttaatcctgaggtgcgtgtgatgcaacagcaaaaaccgctggagggcgcgcagctcgtcatcatgacgatcgcgctgtcgctggcgacattcatgcaggtgctggactccaccattgccaacgtggcgattccgaccatcgccgggaacctgggttcttccctaagccaggggacatgggttatcacctctttcggggtggcgaacgctatctcgattcccttaaccggctggctggcgaaacgttttggcgaagtcaaactgttcatgtggtcgacggtcgcctttgccgcggcctcctgggcctgtggcgtatccagcagcctgaatatgctgatcttcttccgcgtggtgcagggcgtggtcgccgggccgctgattccgctctcgcaaagcctgttgctgaataactatccgcctgcaaagcgctccattgcgctggcgctctggtcaatgaccgtcattgtcgcgccgatttgcggcccgattctggggggctacatcagtgataattaccactggggatggattttcttcatcaacgttccgattggcatcgccgtcgtcctgatgacgttacacacgctgcgcggacgtgaaacgcataccgaacggcgacgtattgacgccgtcgggctggcgctactggtgattggcatcggcagcctgcaaattatgctcgatcgcggtaaagagctggactggttctcctcgcaggaaattatcatcctgaccgtggtcgccgtcatcgccatcagtttcctgatcgtctgggaactgaccgacgatcaccctatcgtcgatctttctctttttaaatcgcgtaacttcacgattggctgcttgtgcatcagccttgcctatatgctctatttcggcgccattgttctattgccgcagcttttgcaagaggtgtacggctataccgcaacgtgggcaggtctggcgtcagcgccagtcggtattattccggtaattttgtcgccgattatcggacgcttcgcgcataaactggatatgcgcaggctggtcacgttcagcttcattatgtacgccgtctgtttttactggcgcgcctggacgttcgaaccgggtatggatttcggcgcttccgcatggccgcagtttattcagggatttgccgtcgcctgcttctttatgccgctgaccaccattacgctctccgggttaccgccagaacggctggcggcggcatcaagcctgtcgaacttcacgcgaacgctggcaggttccatcggcacctcgattaccaccactatgtggaccgatcgtgagtcgctacaccatgctcagctcaccgagtcggttacggcgtataatccaaacgctcagactatgtacgataaactggaaggcttagggatgacgcaccaacaggcgtcaggctggatagcccagcaaatcacgaatcaggggctgattatttccgccaacgaaatcttctggatgtcggcggggatcttcctggtgctgctcggcctggtgtggttcgccaaaccgcccttcggtgcgggcggcggcggtggcggcgcgcactaactatctgataaaagggatctgcggatcccttttttagtagaccaacaatcagaagaaatatttgaatctcagacgcccgccgtaacgcgcatcttcactgttatcgccattattcggattggcctctacccatgaagcataggcaccgaggtagatgttaaagtttttcatatccatcacgttggggaataaatatgaggcatgaatagtgtgaatgtcataattgccgggatcggtgacccagcaatcgtcctcacaaacggcatcgatattggtagcattaaaggcttcgattttgttatgcgcatagatataacccagttcaaatcgatgccacaacgcattcaccccggcggtaaaatctgtctcatcggtcgcgtccatataggcggtattcaggttaatcactgcgccatcttccgggtcagttttttgaccattccaggtcatggtaaaaccatagcccgtacgatctgactgatcgatccacttcccattctcataatagccataggcgttgttaacgacgttactttccatcgctatcgccgttgaaaaacgcccgttttgccaggcgataaccggacggacgtaagccacgtttttatcgttgcttaaatccattccgtggtactgcttctcggtatataacgtactgccattttccagcaatgtgttaacttcgaaataccagttgtcgatggttttactcagcaggaagttacccccgctgtcgctacgtccccgtccttctttcatcatatagatatagccgtaaccgtcactgtaaagatcgttcgctgtattccccgaatattcaataaacgtatcctgattcagcgggaacatatcgtaggcttcaaaacgaccaaccttaattttccagtcattctcacgaccaaagaagaaaacggcatcatcaaggttcatttttccggtcaggtccgccagaggctgtacagagaatccggcaaaattaccgttgtccagccgctggtagccatcaaagcccagcaacaggcgtccgttaatatcccagcgttcattggttcccggtgcccaatctttattcgctgacgttctcgtcgatgtcagactaccggaacggcttgccgcatccatattaaattcgacatcgccatagaacttaatatcgctgaatccggataaagtcagcttcggcggcgttttatctgctgcaatgggctcggcggactggacattcaccgtcggcgtagcggcgacctgctgctgtttcaacgagcgaatttgcgcctcggcatcggatgcccgtttttcagcattaacaacacgttgctccagttcagccagacgctgctcaatagtgatattattcgctgcccaaaggttatgagaaaagcaagcaccgatcatcagcgctaaatatttagccttcattttttatcccttaagtttgatgtataccagataagatttgctaaaaaccccatcgaccggctattagtagagtcttgttattacctggatatctggcgcattccattatgtttttctattaattatttatgatttttagtttatgtgatcaatacactctggcatcgtgagttatccgccttttctgtttaccagatcacattttattatttaacaggccaggcattacttaatttaaaatgtattctcgccgcaaatataataaacgcaaattatattaagcaataaaaaaccccggccataaaccggggttaatttaaatactggaaccgcttacaaataagactaaatatgcagttcctgcagtttttctttcggcagcgccagctctttattgctgttcacgcgcacatcacgctccagaatatgacgggcaatgtcctgcgcttcactgagcgagtgcatctgatacgtaccgcactggtaaacgttcagctccgggatctggttttgatcctgcactttcagcacatccgccatcgccgctttccaggcgtcggcaacacgctgctcgtccggcgtgccaatcaggctcatgtaaaagccggtgcggcagcccatcggcgagatatcgataatctcaacgccgttaccgttgaggtggtcgcgcataaagccagcaaacagatgctcaagcgtatgaatccctttttccggcatcacttctttgttcggaatgcaaaaacgcagatcaaacacggtgattgcgtcgccatgcggggtgttcatcgtttttgcaacccggaccgccggcgcttgcatccgggtatgatcgactgcgaagctatctaataatggcatttagtcacctccgataattttttaaaaataaactgaactctttgttccggggcgagtctgagtatatgaaagacgcgcatttgttatcatcatccctgttttcagcgatgaaattttggccactccgtgagtggcctttttcttttgggtcaggcgtgttttgcaagccacgcggcaaacggctcggtatccgccgcctcaatctcctgctgacgacgtactgaagcgtcacgttcagcaataaactcttcttcctgtaaaatctccagcggctcttcgcgtaacagattacggtaagcctcaccgaacgctttcccggtgccgccaatgccttcatcaatcatagaccgtaggatccgggcggagaatgtcagttcaggattatcaaagcaggcgaccaactcgtcacacaccttttgatactcctctcccccgtggatactgtccagcgtttgcgccacgcgtttcagatcgcggaaaagatctttcccgactttgggcagcgggaactgcgcagtttcacagccaatgcctaacgtcaggcccggcttacgcccttccagaataacgcgattccagttagtacgcgtacataacagctcatcgctactcatttccggcgcatcggccaatacgcaccagaccataaacagatcgaggaagcgcacctgttgctcgtctacgccgatcggtgagaacggattaatatcgagagaacgaacttcaatatactcaataccaccacgcagaagcgcgtcagaaggcgattcgccgctgcgcgtcacgcgcttgggacgaatgggcgcgtacagctcattttcaatttgcagaacgttgctgttaatctgtagccgcttaccgtctttttccacaccaatccgtgcgtactcctcggaaggggttttaatcgcgcgcttcagacctgcaacgtattcatgcaaatcgttaaacgtaattccgagattgctttgcgacttattggtatagcccaaatcactcaaacgcagcgacgtcgcatacggcaggtagtacatgccgcagtccgttttttcaaacggtaatgtggttggctttccttgcaggaaagaggaacaaatggccggagacgcgccaaacagataggggatgacccagccaaaacggtaatagttgcgaatcagacgaaaatagccggcagaaattttttcttttgccgcttcgccttccgtaacgccgcatttcgcctgccagaacgccatcggtaatgaaaaattgtaatgtacgccggagatggtttgcatcaaagcgccataacgatttttcagcccttcgcgatagagcgtcttaaaacgcccggtattggatgtgccgtactgcgccagctctatgtcctgcccttccgcaatatagcagggcatacttaatggccacatccgctcatcgcccagtttcctggccgtataccgatggagatcgcgcataaaggtgagcatatgctggatatcgccatcgactggcgtaataaactccagtagggcttccgcaaaatctgtggtaatccatttatgggtcagcgctgaacctaacgcttcaggatgacctgttgtcgccagcgtgccatcagcattgacacgcagcgtttcgcgctctaacccgcgctgtatcccctttaacgcctgaggatgtttttccagccaggccagagcctgtgatacgtccgggatcaaattgacctcccgcctgtccaaatcgttttaataagcataactgtaatggcggccatacatgccaaacctacaattattaccaccacatcatgccctgaaccgtcgccgctgcgagcgcaacatagcgcagcgccttaccaagacacaaaaaaaagatcgtccgcccccacgggatgcgcatccatcccgctaacaggcacaacaaatcaccgatgaccggcatccagcttaataatagtgtggctgcgccataacgctttagccagccagtcgctttttcctgccaacgcgacgttttgcgcagcggaaagaaacgcccaagaataacgttagttacccctccaaggctattacccattgttgctgttaagactaagacccagggatggctgacgccggagaccagcatagcaaccaaaaccacctcagaattaccgggtaacagcgtcgcgctgagaaaactactggcaaacagagacaggagcgacagtccgtcactcacaatagtcggacatccacggcatccattcccgccgcccgcgccgcctgtaaaccaaaatcggcatcttcaaataccacgcactgcgtcggcatgacgcccatccgctgggcgcacagtaggaaggtgtcaggcgcaggtttgtgatgctgtacgtgatctgccgccacaaccgcatcaaaataacgacgcagccccagatgcgctaacagggcttccgcgatagcgctttcgctaccggtaccgaccgacatgggacgccgcccatgccacgctttaaccacctcaaccagcggcagcggttctacgcagtccagcaggatgctttttaccgcgtcggttttctcacgcgccagtgacaggggatcaagatcggcatggttaagctcaatgattgactgggcgataagccaggttggcgaaccgttaagcgcgaccattgcctgttcatcaaaacgaagaccatagcgccccaaaacctcacgccacgctttgcgatgcgtgggttcggtatccaggagagtaccgtccatatcaaaaatcaaaccagcataacgtgcgtacatcgtgttctcgcaaaccgaataaccagacagtactttatcgcaattggttgattttgtcgctaatagagatgaagaggtatattcaggataagggggaaaagcgattgcagggcagtaacgtatccgggaggattactcgcccttcgggccgttgctgatgcaacgttatccttctgatgccagcggtgattaccgctatcttatctgcatcttcatcgctgaaagtatggagaatatggtgcatccgggaggattactcgccttacggctcgcccttcgggccgttgctgacgcaacgttatccttcctggtgccagcggtgattataactatcttatctgcatcttcatcgctgaaagtacggagaatatggtgcatccgggaggattcgaacctccgaccgctcggttcgtagccgagtactctatccagctgagctacggatgcattggaaatgatgtttactacaagatttgatgtcgcatttactgccacactaaataagatggtgcatccgggaggattactcgccttacggctcgcccttcgggccgttgctgacgcaacgttatccttcctggtgccagcggtgattaccgctatcttatccgtatcttcatcactgaaagtacggagaatatggtgcatccgggaggattcgaacctccgaccgctcggttcgtagccgagtactctatccagctgagctacggatgcatcggaaaacttgctttactgccgatattgataccgcggtgaaagccgtatcaagtaagagatggtgcatccgggaggattcgaacctccgaccgctcggttcgtagccgagtactctatccagctgagctacggatgcatcgggaaacttactttactgcagattttgataccgcggtgaaagccgtatcaggtaagagatggtgcatccgggaggattcgaacctccgaccgctcggttcgtagccgagtactctatccagctgagctacggatgcaaatggcggtgaggcggggattcgaaccccggatgcagcttttgaccgcatactcccttagcaggggagcgccttcagcctctcggccacctcaccacacgcctcttacgagtgcttcgaagaacttgttctgctcatcgtcgctgcgtggcgcacatattactttctgggacttataagtcaaacaatttttccagagcttttatcgtttgcacacttcacgctcaattagtctgtaaaaaagccaaaaagagtgttttatcaacagataatttgatgacacgctggccgccaaaagcgcaccatatcaacagtgaggttgaaaaaagtcatgaagggacaacgcgggcgagcgagaagagaggctgcgtctcacccgaaaagtgagacgcgaaaaccttagtaactggactgctgggatttttcagcctggatacgctggtagatctcttcacgatggacagaaacttctttcggggcgttcacgccaatacgcacctggttgcccttcacccctaaaactgtcacggtgacctcatcgccaatcatgagggtctcaccaactcgacgagtcagaatcagcattctttgctccttgaaagattaaaagagtcgggtctctctgtatcccggcattatccatcatataacgccaaaaagtaagcgatgacaaacaccttaggtgtaagcagtcatggcattacattctgttaaacctaagtttagccgatatacaaaacttcaacctgactttatcgttgtcgatagcgttgacgtaaacgccgcagcacgggctgcggcgccaacgaacgcttataattattgcaattttgcgctgacccagccttgtacactggctaacgctgcaggcagagctgccgcatccgtaccaccggcttgcgccatgtccggacgaccgccacccttaccgcccacctgctgagcgaccatcccaatcaattcccctgctttaacccggtcggtcacatccttcgacacgcccgcaatcagagaaaccttaccttcaacaaccgttgccagtacgataacggtagaccccagttgatttttcagatcatcaaccatggttcgcagcattttcggctcaataccagcaagctcgctaaccaggagcttcacgccgttgagatcgaccgctttactggaaagatttgcactctcctgcgctgcggcctggtccttcaactgctgcaactctttttccagctgacgtgtacgttccagcacggcacgcactttgtcgcccagattctggctgtcgcccttcagcagatgcgcaatatcgtttaagcgatcgctttgcgcatgaacggtggccatagcgccttcaccggttaccgcctcaatacgacgaatgcccgctgcggtgccggactcagagataatacggaatagaccgatatcaccggtacgactggcgtgagtaccgccgcacagttcagtagagaaatcgcccatgctcagaacgcgtacacgttcgtcatatttctcgccaaacagcgccatggcccctttcgccttcgccgcgtcgagatccatgatgttcgtttcaatcggcaggttgcggcgaatttgcgcattcaccaaatcttcaacctcacgaatctccgacggcttcatcgcttcattgtgcgagaagtcgaagcgcagcactttatcgctaaccagcgaacctttctgcgcaacgtgtgtcccaagcacctggcgcaacgccgcgtgcatcaggtgcgtggcggagtggttcagacggatacgtgcgcggcgcgcttcatctacgtcagcctgtaccgcatcgcccactttcagagcgcccgcagacaatttgccgaggtgaccaatcgcctgaccatatttttgcgtgtcgtccacagcgaaagtaaatccagcgcctttcagctcgcctttatcgccaacctgaccgcctgattccgcatagaatggggtctgatccagcacgacaaccgcttcctgtcccgcgttaatcgcttcaaccgctttaccatcgacaaacagcgcagtcactttgccgttcagttccagatggtcataacctttaaattcagaagcgctatcaacgcggatcatcgcgttgtagtccgcgccaaaaccgctagcttcgcgcgcgcgacggcgttgctcttccatagcggcttcaaaaccggcttcatcgactttgatgttgcgctcacggcagacgtccgccgttagatcgaccgggaaaccataagtatcatacagacggaaagcggtttcgccgtccagggtgtcgccctgcaatttcgccagttcttcatccagcagcgccagaccgcgctccagcgtacgggcgaactgctcttcttccgttttcagaacctgttcgacctgcgcctgctgacgtttcaactcttcgcctgcggagcccattacctcaatcagcggcccaaccagcttgtagaagaaggtctctttcgcgcccagcatgttgccgtgacgaaccgcgcgacgaataatgcgacgcagcacatagccacggttttcattcgacggcagcacgccatcggcaaccaggaatgcgcaagaacggatgtggtcggcgataacgcgcagcgatttattacccagatcggtggcgccagtgactttcgctaccgcttcaatcaacgtgcggaacaggtcgatgtcatagttagagttaacgtgttgcagtaccgcggcaatacgctccagccccataccggtatctacagacggtttcggcaatggttccatcgtcccgtcagcctgacggttgaactgcataaagacgatgttccagatctcaatatagcgatcgccgtcttcttccgggcttcccggagggccgccccagatgtggtcgccatgatcgtagaagatttcggtgcacggaccgcagggaccggtgtcgcccatctgccagaagttatccgatgcgtatggcgcgcctttattgtcgccgatacggataatacgctcgcgcgggatgccgacttctttttcccagatctcataggcttcgtcgtcggtttcatagacggtgacccataaacgctcttttggcagagcaaaccagttttcaccggtcagtaattcccatgcgaactgaatggcgtcgtgtttgaagtaatcgccgaagctgaagttgcccagcatttcgaagaaagtatggtgacgtgcagtgtatccgacgttttccagatcgttgtgtttacctcccgcgcgtacgcaacgctgggaagtggttgcacgggaataattacgtttatcgagcccaaggaaaacatccttgaactggttcatcccggcattggtaaacaacagagtggggtcattgttaggcaccagggaactgctggcaactacctgatgccctttactatggaaaaagtcgagaaacgcctgacggatctcagcggtgctcttgctcataattatcctgaaatcaagctacacttcatccttcaggccgcctctgcgttggctgcgagtttcccggtcacgcgttcccgaggctcacttgccgctttgatgcggcttgaatgattttgtgtatttaaggaatattcgtcgcagacgctgttcgccgttaagcaacccgcgtccagacggaaaaagtgggaataagataagttttctttaccgggaagtaaaatcccgtatgcgctcaatctgcaaaatttcgccatatttgctggatattgtccatcagatacccgcgatagagcaaaaagcgctgtaccttaaccttttctgaaaagtttgaagggagcggctcgccatatttgcgaacggcctgttcacgtgccatttcactccagtcaatttcacattctcgcatcgctttttcagtcgattcacgggaaatgcctttctgattcaactcctggcgaatacgcgccgggccatagcctttgcggctacgactggcgataaagcgcatcacgaagcgctcgtcatcaagatagtgatgttcgtggcaccaggcgatcacgcgttcataatcgtctgccgtcgcatcaatctcttccggcccatttttgcccatcaccggcgcggagagtttacgccgtaattcctgctcgctgtgatcgcggacagcaagaatacgtaccgcacgatcaaggagacgagcataagcgggacggcgcgatgtgggttcactcataaaaaaccttaacagggagaaatgccaaaagggccgcataaatgcagcccttgatggtaatttaacgttttgctgaatggcggcttcgttttgcccgccccaccatcacctgatgattaaaaatcttcgttggtttctgcaacgccttcgctatcgtcaacggcgaaatcgggcgtggcattctgattactcaacagtaattcacgaacccttttctcgatctctttcgctgtcgccgggttctctttcagccaggtagtcgcgttcgctttaccctggccaatcttctcgccgttgtagctgtaccatgcgcccgctttctcgatcagcttctctttcacgcccaggtcaaccagttcgccatagaagttgatgccttcaccgtagaggatctggaactcggcctgcttaaacggcgcggcgattttgtttttcaccactttcacacgcgtttcgctacccacgacattatcgccctctttcaccgcgccaatacgacggatatcaagacgaacagaggcgtagaatttcagcgcgttaccgccggtggtggtttccgggttaccgaacatcacgccaatcttcatacggatctggttgatgaaaatcaacagcgtgttggactgtttcaggttccccgccagcttacgcatcgcctggctcatcatacgcgccgcgaggcccatgtgagagtcgccgatttcgccttcgatttccgctttcggcgttagcgccgctacggagtcgaccacaatgacgtccaccgcgcctgaacgcgccagcgcgtcacagatttccagcgcctgctcgccggtatccggctgagagcagagcaggttatcgatatcgacgcccagcttgcgtgcgtaaacagggtcaagcgcgtgttccgcatcgataaacgcacaggttttaccttcacgctgcgcagcggcaatcacctgcagcgtcagggtcgttttaccggaagattccggcccgtaaatttcgacgatacgccccatcggcagaccgcccgcaccgagtgcgatgtccagtgaaagcgaaccggtggagatagtttccacatccatagaacggtcttcacccagacgcatgatggagcctttaccaaattgcttttcaatttggcccagtgctgccgccaacgctttctgtttgttttcgtcgatagccattattactcctgtcatgcaacttggtattgaaccggatagtgaattcgtactgttgaagcaattatactgtatgctcatacagtatcaagtgttttgtagaaattgttgccacagggtttgtagcgcgtatgtcgtcgcctgtcgacgcaccgattcacggtcgccgctgaagcattcccgacgcgtaatcccttctccactgacgctggcgaaagcaaaccacaccgtaccaaccggcttttcttcactgccgccatccggcccggcaatcccgctaatagcgacagcaaaatcggcgcgagcggccttcagcgccccgatcgccatttcgaccactacgggttcgctgaccgcgccatgctgcgccagagtctcttcacgcacgccaatcatctgcgctttggcttcattactataggtgacaaagccgcgttcaaaccaggcggaacttccggcgatgtcggtaatggctttcgccagccagccgccggtacaggactctgctgtcgttacggtcgccccgcgcgcttttaacgccagcccgacctgctcgctaagccgcatcagttcactgtcagtcatcatgacctctgtcagttagaaatcctgccgcacaagatagcactttctcaccagagatggggacgagctgtcgattttacgagtcggattccgaaaaaatgccagcaggttatttatgcagaatgaaagaggtagcacttgactaaatagcagtaccatgtcgctaaatttacacgtacggagagaaagcaaggatgtcactcaaaaaaacggaaagcacacagcacaaactgaaacaaacctgtcaactacggctgtggttaattgtgggtggagtatgttcattaggaatgggagtactgaatatattgtcgtcaggctattttgaaccgtatgacggcggtcaaattatcttaggcctgggatgtctgggatatagtctggcactatcaaagaagatatcccacttgcaggcagagaatcagcccaaaaagccataataatagcggagggggtgctcccctccctaagcgtaaattagcgcacccgcgccagcgctaccgcctggcccagttgccaaaccgccatcgcataatgcgtgctgtggttatatcgggtaattgtgtagaagttcggcaggccgtaccagtactggtatcccgtaccgatatccagacgcagcaggctggcttcctgatgattgcccaacgattgctgcggcgttaagcctgcggcggcaagctgagagatgctgtattttgttttgaaaccattcgccaacccaggcgcctgaccactcgccggcaccgcaaccatatcgcctttcacccaaccatgcgccttgaaatagttcgccacgctgccgatggcatctaccggatcccacaagttaatgtgcccatcaccattgaaatcgaccgcatattctttataggaagatggcataaactggccgtagcccatcgcgcccgcaaaggaacctttcagattgagcggatcgtcttgctcatcgcgcgccatgagcaggaaggtttccagctcgccggagaaatattccgcccggcgcggatagttaaatgacagcgtcgccagcgcgtccagaatccgcgttttccccatgatacgtccccagcgggtttccacgccgatgatgcccacgatgatctccggcggtacgccgtatacctgccaggcgcggttcagcgcgtcttcatactgattccagaacgcgacgccgttttgcacgttatccggcgtaataaattgtttgcggtagcgcaaccaggcgccatttggtccggcgggcggctgagtggtcggcgcttgtctgtccatcagacgcaggacgtaatccagtcttttagactgcgagaggatctcttgcaactgctgacggtcgaaaccgtgtttactgaccattttatcaatgaactgctgcgcattagggttgttggcgaagtcgccgcccatttgcatgacgttatgctgcggctcaagcagaaagccgccggaaggcgtgcccgtcgtcgcttgagtctcggaagattttggcgtgctgctacaggcagcaagcaatacgcaaagtggaagtaacgctacataacgacgcttgaacatgagacatccattaaacaaattcagccagggagaagtatggtaaagcatcccccgccgcacaaggaagcggcacaagagaataaatcacctttctcctcttttcagtttgtatacgctccctcactcccacaatctttcaatttaaaatatttttcttttattttgcgatcacaataacacttttaaatctttcaacatgattacaatgaacaggaaattagcaagaaaactaaaaaccctacaggagagaacaatgatcgaaaccattacacatggtgcggagtggttcatcgggttattccagaaaggcggagaggtgtttaccggtatggtgacaggtattcttccgctactgataagcctgctggttatcatgaatgcgctcatcaattttatcggccagcagcgtattgagcgttttgcccaacgttgtgccggaaatccgctatctcgttacctgcttttaccgtgtatcgggacatttgttttttgtaatccgatgaccctgagtttgggacgctttatgccggagaagtacaagccgagctattacgcggcggcctcctatagctgtcactccatgaacggtctgtttccgcatatcaatcccggcgaactgtttgtttatctggggatcgccagcggactcaccacgttagggcttcctctcggcccgctcgcggtgagctatctgctggtaggtctggtgacgaacttcttccgcggttgggtcaccgatctcaccaccgctatttttgagaaaaaaatggggattcaacttgagcagaaagttcatctgacaggagcggtatcatgacacgggttcgcattgagaaaggcgccggcggctggggcggcccgcttgaactggacgttacgccagacaaaaagatcgtctatatcacagccggtacgcgcccggcgatcgtcgacaaactggcgcaactaacaggctggcaagcggtggacggctttaaagaaggcgaaccgccggaagcggagatcggcgcggccattatcgactgcggcggtacgctgcgctgcggtatctatccgaaacgccggattccaaccattaatattcactcgacgggtaagtccggcccactggcgcagtatattgttgaggatatttatgtctccggcgtaaaagaagaaaacattactcttgtcggcgaaacgcctgccagtccccagcctgccaaaacgacattaggacgtgactacgacaccagcaaaaaaatcaccgagcagagcgacgggctgctggcaaaagtcggtatgggaatgggctccgccgtggcggtactgttccagtccggtcgcgacaccattgatacggtcctgaaaacaatcctgccgtttatggcgttcgtttcggcgctgatcggcatcattatggcctcaggtcttggcgactggatcgcccacggcctggcgccattagccagccatccactggggctggtgacgctggcattgatctgctcgttcccgctgctgtcgccctttctcggccctggcgcggttatcgctcaggtcattggcgtcctgatcggcgttcagataggcctgggcaatatccccccgcatctggcgcttcccgccctgttcgcgattaacgcgcaggcggcctgcgactttatcccggtcggcctgtcgctggcggaagcgaaacaagacaccgttcgcgtcggcgtaccttctgtgctggtcggacgcttcctgactggcgcgcccacggtacttatcgcctggtttgtttccggctttatctatcaataagaggttcagacatgagcgtgatttatcaaaccaccatcacccgtatcggccagagcgcgaaggaagcgctcggcgaacagatgctgattacgtttcgggaaggcgcgccggcggatatcgaagaattttgcttcatccattgtcatggcgaactgaccggcgcgctgcagcctggcgcgcggtgtgaattgggtcaacattgctatccggtcacggcggtcggcagcgtagccgagcaaaacctgcgtgaactggggcatatcactttgcgcttcgatggtctgcgtgaagcggaatttcccggcaccgtacacgttgcggggcctgtaccggacgatatcgcgccgggctgtattttgacgtttgtcgcttaaggagaaaaaacatgaatcaagttgccgttgtcattggcggaggccagaccctgggggcattcctttgccgtgggcttgcagaagaaggataccgcgtggcggtcgttgatattcaaagcgataaagccgcgaatgtcgcccaggaaattaacgccgattttggcgaaggtatggcgtacggttttggcgccgacgccaccagcgagcagagcgtgctggcgctttcccgcggcgtagacgagattttcgggcgcgtcgatctgctggtttacagcgcgggtatcgccaaagcggcgtttatcagcgatttccagttgggcgattttgaccgctcgctacaggtgaatctggtgggctatttcctctgcgcccgtgagttttcccgcctgatgatccgcgacggcattcaggggcgcattattcagattaactctaaatccggcaaagtgggcagtaaacacaactccggctacagcgcggcgaaattcggcggcgtggggttaacccagtctctggcgctggatctggcggaatacggcattaccgtacactcgttgatgctcggcaacctgttgaaatcgccgatgttccagtcactgctgccgcaatacgccactaaactgggcattaagcccgatgaggtggaacagtattacattgataaagtaccgctcaaacgcgggtgtgattatcaggatgtgctgaacatgctgttattttatgccagcccgaaagcgtcttattgcaccgggcagtcgatcaacgtaaccggcggtcaagtgatgttctgaccgtgaattgccggatggcgccgtaggccggataagacggttacgcgccatcaggcaaaacaacaggagcacattatggtttccactctgattaccgtcgccgttatcgcctggtgtgcgcagctggcgctgggcggctggcagatttcccgctttaatcgggctttcgataaacttagccaacaggggcgggtcggcgtcgggcgctccggcgggcgttttaagccccgggtggtggttgccgtggcgctggacgaacagcagcgggtgacggacactttattgatgaaaggccttacggtattcgccagaccggttaaaattgccgcaatgcaaggaaaacatttgcatgaattacagcctgatgtgatctttccccatgattcgctcgcgcagaatgcactatcattggcgcttaaactgaaacatgggtaatttcgttgtgaatgcgtatagcttgcgaaattatcattttgcaaccaataccctaaataattcgagttgcaggaaggcggcgacgcagcgaatcccaggagcgtacatcagtacgtgaccggggtgagcgaggaaagccaacgcacatgcagcgtgaagtatgacgggtaaatacataagtcagggtaatcacgcctatgaaacctcgtcagcgtcaggccgcgattctggagcacctgcaaaaacagggaaaatgctcggttgaagaactggcccagtactttgacacgacaggcaccactatccgtaaagatctggtcattctggaaaatgccggaaccgtcatccgcacctatggcggcgtggtgttgaataaagaagagtccgatccgcctattgatcacaaaacgcttatcaacacccacaaaaaagcgctgatagccgcagccgctgtgaaatatatccatgatggcgattccattattctggacgccggaagtaccgtgttacagatggtgccgttgctttcgcgttttagcaacatcacggtgatgaccaacagcctccatattgttaacgcgctatcggaactggacaacgaacaaactatcctgatgcccggcggcaccttccgtaaaaaatcggcgtcgtttcacggtcaactggcggaaaacgcctttgagcaattcagctttgataaacttttcatgggaactgacggtattgacctgaatgtcggtgtgaccacgttcaatgaggtttacaccgtcagtaacgcaatgtgcaatgcagcacgcgaggtgattctgatggcggactcctcaaaatttggtcgtaaaagccccaatgtggtgtgcagtctggaaaccgtcgacaaactgatcacggacgcggggatcgatccggcatttcgtcaggcgctggaagcaaaagggattgaagtaatcataaccggagaaagcaatgagtgatgcactactaaacgcgggccgtcagaccttaatgctggagctacaggaagccagccgtctgccggagcgtctgggcgatgattttgtccgcgccgccaatatcattattcactgtgaaggcaaagtgatcgtttccggtattggtaaatcaggtcatattggtaaaaaaatcgccgcgacgcttgccagtaccggtactcccgctttttttgttcatccggcggaagcactgcatggcgatctggggatgattgaaagccgcgacgtgatgttatttatctcctattccggcggcgcaaaagaactcgacctcatcatcccgcgtctggaagataaatccgtcgcgctgctggcgatgaccggtaaacttcactctccgctggggcgagcggcaaaagccgttctggatatttccgtcgagcgtgaagcctgcccgatgcatctggcgccgacatccagtaccgtcaatacgctgatgatgggcgatgcgctggcgatggcggtcatgcaggcgcgcggttttaacgaagaagatttcgcccgttcgcatccggctggcgcactgggcgcgcgtttgctcaataatgtgcatcacctgatgcgccagggcgatgcaataccgcaggtgatgcttgccaccagcgtgatggatgccatgctggaacttagccgtaccgggctggggctggtggcggtttgcgatgagcaacatgttgtgaaaggcgtctttaccgacggcgacctgcgtcgctggctggtgggcggcggcgcgctcaccacgccggtaagcgaagccatgacgcccaacggtattacgctccaggcgcaaagccgcgccattgacgccaaagagctcctgatgaaacgcaaaattaccgccgcgccagtggtcgatgaaaacggcaaactcaccggcgccattaacctgcaggatttctaccaggcggggattatctaatccttcagtcccagacgcttcgccagccgatgcaggttggcgacgtcggtttccagcgcccgcgcgctggccgcccagttatgattattttgcgccagcgcctggcgaatcatctctcgctggaagttctccgtcgattcgcgcaaattgcggcaagtcggcagcgccagaaagctttccgcaggcggcgcgggtaaaacgtcctctgacaaggcaaaatgctgtgcctccagtatcacctcatcccctgcccgggtcgctctcgccagtacaaccgcacggtgaatggcatgttccagctcccggacgttgcccggccagccatagttgagcaaatggcgacgtgcgccgggactcagtaccacgcgggacagccccagccgcagtcggcactgctcgcaaaaatagcccgccagcagcaccacatcatcgccgcgctcgcgcagcggcggcacaaagagcgggaaaacgctcaggcgatggaacagatcggcgcgaaaacgccctgccagcacctcttcacgcaggtcacggttggtcgccgccaacacccgcacgtccacgcgcaggctacgatcgtcgccgacgcgctgaatatcgccatactgcaacacgcgaagtagcttagcctgtagcgccagcgacagttcgccaatctcatccagaaacagcgtaccgttatccgccatttcgaacttaccgctacgattactgatagccccggtaaaagccccttttacatgaccaaacaactcgctctccgccacgctttccggcagcgcggcgcagttgagatagaccagcggattaaccgctctgggggagccctggtgaatagctttcgccaccagctctttaccggtccccgtttcaccgccgatcagcacgttaagatcggagcccgccacaatctcgatctcttttttcaactgcgtcatcgccggcgacaggccgatcatgtgcgtctcttttatcggttcaaacacgcctgacgaccccggcagcatgttctggctttccagttgttcaattaacagcgcattactcaatgccccggcggccagcgcggcgacaagccgtagttcttcatcgctaaatacctcgaactgctccggcgtcatagcatcaagggtcagcgcaccgatgaggttctgtccggcaaacagcggcagaccaacacaggcgtggactttcaggctttcctgtccgggaattaacccgtcatacggatcgggtaaatcgctatcagccggaaaacgcaccacgtcccccgcgcgggcgatggcttccaggcgcggatgcccttccagggtaaaacgtctgccgaggacgtcctgcgccaggccatcaatcgccagtggaataaattgtcgtgattcatagcgcagcagcgccgaggcgtcgcacgccagcacctgacgcagcgtagtaatcagccgctgaaaacgatcctgatgcccaatgccgcgttgtaactcaatggcgatgcccgccaatacctccacggaaaaactcatggttacctcattgtcattttgacaacctatagtgtcatattgacagcatcatttatagtctttttgactacatcaaaaatacaaaacaaatataactcaatacaaatcaataagatgaaaagttggcacactagctgcaataagcaaaacaactttttgtaaacgttgaatgaattgaggtggttatgtctattctggttaaaaataatattcattgggttggccagcgcgactgggaagtacgtgattttcacggcactgaatacaaaacgctgcgcggcagcagctataacagctatctcattcgtgaagaaaagaatgtgctgatcgataccgtcgatcataagtttagccgtgagtttgtgcaaaacctgcgcagtgaaatcgacctcgcggatatcgactacatcatcattaaccatgccgaagaagaccatgcaggcgcgctgaccgaactgatggcgcagatcccggacacgcctatctactgtaccgccaacgccattgactctatcaacggccatcaccatcacccggaatggaattttaaggtggtgaaaaccggcgatacgctggatatcggcaacggcaagcagttgatcttcgtggaaacgccgatgctgcactggccggacagcatgatgacctatatgaccggcgacgcggtgttattcagcaacgacgcctttggtcagcactactgcgacgagcgcctgttcaatgatgaagtggaccaaactgaactgtttgaacaatgccagcgctactacgccaatatcctgacgccgttcagccgtctggtaacgccaaaaattaccgaaatcctcggcttcaacctgccggtggatatgattgccacctcacacggcgtggtatggcgcgacaacccaacgcaaatcgtggaactgtatctgaaatgggcgacagattatcaggaagatcgtatcactattttctacgataccatgtcgaacaatactcgcatgatggcggatgccatcgcgcagggtatcaacgaagtggaccccaacgtggcggtcaaaatctttaacgtcgcccgcagcgataaaaatgaaatattgaccaacgtcttccgttcgaaaggcgtgctggtcggcacttctaccatgaacaacgtgatgatgccgaaaatcgctggtctggtggaagagatgaccggcctgcgctttcgcaacaaacgcgccagcgccttcggttctcatggctggagcggcggcgcggtggatcgactgtccacgcgcttacaggatgccggttttgaaatgtccctgagtctgaaagcgaaatggcgtccggatctggatgcgctggagttgtgccgtcagcacggtcgcgacatcgcgcgtcagtgggcgcttgctccgctgccggaaaccacacagcaaatcgcgccagtcgaagaaaccataacctgcaccgccgcagacctcggccccaaaatgcaatgcagcgtatgccagtggatttacgaccctgcgctgggcgagccgttgcaggatgtcgcgccgggtacgccgtggaacgacgtgccggataacttcctgtgcccggaatgttcattaggtaaagacgtgttcgacgtactggcgacggaggcaaaatgagtcgggggatcatcattattgggtcgggcttcgccgcccgtcagctcgtcaaaaatattcgtaaacaagatgcgcatgtgccgttaaccctgattgcggcggacagcatggatgagtacaacaagcccgatctcagccacgttatcagccagtcgcagcgcgccgatgatctcacccgccagttagcgggggaatttgctgaacagtttaatctgcgacggttcccgcatacctgggttgctgacattgatgccgatgcccatgtggtgaaaagtcaggataagcagtggcagtacgacaagctggtactggcgaccggagcgacagcctttgtgccgccgattgcaggacgtgagttaatgcttactttgaatagccagcaggagtaccgcgcctgtgagacacaactgcgcgacgcgcagcgagtgctgattgtcggcggcggtctcattggcagtgaattagcgatggatttctgccgcgccgggaaaacggtaacgctgatggataacgccgccagccttctcgcctcactgatgccaccggaagtgagcagtcgcttacagcatcacctgaccgatatgggggtgcatctgctgctgaaatcgcagttgcaaaaactggagaaaaccgaagccggtatccgcgctacgctggtaagccagcatagtattgaggtcgatgcggtgattgccgccaccggcttacgcccggaaaccgctctggcgcgccgcgccggagtagccgtcaaccgcggcgtctgcgtggatagctatctacagaccagtcacccggatatttatgcgatcggcgattgcgcggagatcaacggtcaggtgctgcccttcctgcaaccgatccagttaagcgcgatgtacctggcgaaaaatctgctcggcggcaacgcgccgctgaagctaccggcgatgctggtcaaagtcaaaacgccggaactgccgctgcatctggcgggagaaactcagcgccgcgatttgagctggcatattaccgcagaatctgacggtatgattgccaaaggcatgagcggagaaggccaactacgcgcctttgtggtgagtgaagaccgcatgaaagaggcctttgcactgctaaaaacgttgtcggtataagcctgtgatgccggatggcgccgcttcgcgtcttatccggcctacgagtgagcatctgtttacaggccggataaggcgcagccgccatccgtcgccctacacttcacttaacgctcgcgctgcggcaatcacgccctgtccaaacgacagcccgccgtcgcccgctggtaaccgctgcggaaataacaatttaaaatcagaaagataaaaggcaagacgcgcgcgaagtaagcggttgtgtatcaccccgccgctgaagaccagagtggttatcccccgcgccgtagcctgctggcgcattagcgtggcaaacccgcacgccagcgcatcatgaaaagcccaggcgcgttgcgcaggcgtggcctgccagttcaaccattgccgccagaaaacggcgacgtccagttgagcgccgttaagcggcatcgttaccggatgctcaacgttagcgcattgagaggccagcgcctccagcgcgcaggcggcctcgccctcatagctaagcgatgctggcgcgcagcgaagcgcggcagccaccgcgtcaaacaaccgcccgcaggaagaggccaacggggcattgacgccgcgctcaatggcgcgcgccaggacattccagttttgctgttgcagccccgctgtctccgggtaatcctgccagtccggcacaaagcgcaggcactgcgccaacagattacgccacggatgtttggcagccagatcgcctcccggcagcgccacggcgggtaaaccacctaaatgttcgcattcgcgataattgacccgcaaacattctccgccccatagcgcgccattctcacccatgccgataccgtctaccgtcagggcaatcacctctccgccgtccagcggccaaccatgctcggccaggcaagccgccgcatgggcatgatggtgtaacaccgtctctgtcggcagacgcatctcactggcccactgactggaaacatagcccggatgcgcatcacagacgatacgctctggcgtaaaatcgtagattgactggatcagacgcaatgcctcgcgccactgcgcctggataccgtcatcgctgagatcgcctaaatgttggctgacaaccgcctgtgcgccgcgtaccagacagaacgtgtttttcagatccgcgcccagacaaagtatcggcggcacatcgcgaaatccgggcggcaacgcaatcgcgtccggcacgtatccccgcgaacgacgcagcatttcgccgctgtcgcgtacgacagagtcgtccatgcgctgtacaatgtcgcgattgtgcaacagaaaaccatcggcaatatcgtgtaaatcgtccagcgcctgttcgttggtgatggcgggcggtttgccgctcaggttgccggatgtcatcaccagcgggtaattgagctcctgcaacaagaggtgttgcaatgggttggctggcagcatcacacccacctccgtaagtcctggcgcgatgccctcactcagcgaaggtacatactgcttatccaccagtacaatcggggccgctggcgtggtcagcagcgaacgcgccgcgctcggcagcgtttgcgccgtgggcaacatcaccgccaatggtttcgccggacgatgtttacgcgcccgcagcatcgccactgcgttagcgttgcgcgcatcgcaggccagatgaaaaccacccagccctttaacggcaataatgcctccggcgttcagttgggcgaccgccgcctgcaaagccgcctctttttccgctcgttcatgttggctccgccactcaagatgcggcccgcatgacggacaggcaacgggctgggcatgaaaacggcgatcgtacggatcgcggtattcgctgtcgcattccggacacaagggaaacgccgccatcaccgtaaatggccggtcatagggcatagcgcgaataatggtgaagcgtggtccgcagtgggtgcaattgatgaaaggataacggtagcgccgctcgcctggggtattcatctcggcaagacatgccgggcaggtcgccgcatccggcacgatttgcgtgttcatcgaaccgcctgcgctctgacgaatggtgaaatccgtcggcgcgcgctcccataccaacgacgcgtgttcaacgctgtcaatgcgcgccagcggcgggcaatcctgatagagcgcggcaataaattgcgacggctcttccagcagccgaacgacgacgccgtcgccgtcattacacacgtcgccgtgtaatcgcaactgctgcgccagctgccagacaaaaggacgaaaaccgacgccctgtactttgccccgaatgcgtagctgtacgccggaaggtgtgtctatcgccatcttattttcccgccatcatcgaacccggatgcctgatggcgcgacgcttatcaggcctacaaccgcacggaccgtagaccggataaggcattgatgccgccatccggcaatgctttgtggcgtattctacgcgcaatcgcagaaatcagaaaagcagcgatgccgttgaatccagcgccgcgcgacggcgtttttccgcgctcagctgttcaagcttattgcggtccacgcagattagggcgtgcgttgggcaagcggccatacaggccggaccggcttcacggtggtgacacagatcgcacttgttggcttcggctttttcggcacgcacgttcagccccgcgccgctattgcgaaccaccggacgtaccaccacttccatggcgccgtaaggacatgccactacgcaagttttacagccaatgcagcgttcctgcatcacatgaacaaagcctttgtcacggctgatggcgccattcgggcaaacgttggcgcacggcgcgtcttcacactggcgacacagcgttgccgtggaaacgttcacgcctttgatgacatggatacgaggtaaaaaggtttcaggggtcagcgatgcgcaatcctgattttcctgatgggatacgacgcaagccacttcacaggtacggcaaccaatgcacttactcgcgtctgcaatgatgaaacggttcatcaaattctccagcaataacagatgatgtgccgatatatacacgaatcgtgccaatttttatttcattgttatttaagaatattatttctattttcgtgagcatttacgtgtcatcgtcacaagtgtcgatgacacgtaatgtcgccagtggtggtcaagatttgcagtgatagccagccaactctgcaccgcaactggcatcaatcctgattaacgcctggcaatacgttaccgcgtattaaacagcgctgcgtaagggaaagatcgtccgtttgcggattccttccggcaataggtttgataattaatttacgaccaggatagtgattaaaacgggtcagcgccggataactcaaccggccaaaccagccgtgtacgcgctgccagcgggcgtccttcacctgatataaattggttatccagtagcctgagtcaaattgcatatccaacagttgcgtgcgcccattgccctgtaaatcaagcaaatcatcaacgccagtatcggtcgcggtataaaacccccacggttcaaagacgcaggggcggccattcttgagaaaggtgaaaatgatgtattgcgcgctcggcgccaggcccaacccaggattgcccaaccagataaccagatcctgaatgccgttacgatcgaggtcagcgcgataaaattgcgcattacccgccaaattaatcagccttccaaccgggacaacccacgaattaccggctctgtcttttccgctaatccgccattcgttatcttttttcggctccggcagtagcgtcacgccactgactccgacctggcgaaagtgccaggtctggtcgggcgatacagaataaggcagggtcaacagcggcttcagcgcacgcttttgcgcatattcaccgtcgctcatcggcaggtaaccgacaacaccggtggccagtgcgcgtgcggcgaggcagagaaatagcagtccgctccatacgataatcttcacgtccttcttacaacctttgccgtgtaacacaaattctccctaaatatgtgcgcattttacgcctccggcgcttccagcgcggcaaatccgccgtttccctgccagccttccaggcgctgatagacgatgtttaccgcgtccttaatcggttgagtcatcggataataaaacccgacgatatccggctggataccaacaaaaatcacctccccgacatcctctttcagctgatcgataaggtagttgagcggcatattgtgggtggtcatcataaacatttcggcgatatcatccggatcgatgatgcggatctcgcccggattaagtcccatatcggtggcgtcgacaatcaacagacgctgcgggcgcagttcgcgaatcgccacaatgtcgttttccggcgcgctgccgccatcgatgacaacccagttgcccttcggctgcgccgcgcacatttccgccagtaacgggcctgcgccgtcgtcgcccatcatgctgttgccgacacagagtaaaacgtcagtcacgaagcctcctcaccatcagatagatggcgctttcctgatgaatgtcatacagcatactgagcatcagtttgctccattcttgctgctgcggggtctgcgcggcgcgcgcctcatcaaacgcgcgcgccagcatttgaacatggttgaaatcgatgacgatctcgccatacttcggcacgccttccattttacgccgggcatcgctaccggcttccagggtggcgatccacgccagatactcatcccatgggcaggtgagtgcggcctccagacaatcgataacccccaggtggtgaccaatcgccaggctgtaatagacaacctgctgcgcctcggcaggcgtcgcatcgttctcatcaataaacttacggctcagttgactgaacaccacctgttcgctcatcggatacgcgcctcttcaacaacatgattgagatgggtgacaatttcggttaaacgcggatcgttttccgcttccagccaacgcgccacttgctgctcgccctgccccaactgtgtcaggtaatcatcggcgatctgacgaccatagcgataacccgccagccggcgcgccgcgcgatccaccttcacgcgcagcggctgcaccatatccggatgcaggatctctgcgggctgatcgtccagctcacccggcgcgcgggcgtggattttctgctccagcaggccaagcgccattgcaaatccgtacagcgtggcggcaggcgttggcgggcaccccggaatgtacacatccaccgggacgattttgtcggtaccgccccagacgcagtagagatcatggaagatgccgccgctgttgccgcaggcgccgtaagagatacaaattttcgggtccggcgccgactgccaggcgcgcagcgccggagagcgcatggcgcgggtcaccgcgccggtaaacagcagaatatcggcatgacgcggcgacggtactactttgatgccgaaacgctcggcatcaaacagcggcgaaagcgtcgcaaagatttcgatttcacagccgttacagccgccgcagtccacgcggtaaacgtatgccgaacgcttaatatttttcagtaaagacgccttcatgctggcgatggattcatccaccgtcatcggtaccggaatgccgttggcgtcacgcgggcctaataaattgctcattagctgacctctttcatatggcgagtcagttcaatacggtcggacggcaccaggcatttctgacgcttacagtccgggcaggtctcaaagctttcgcggtggttttccgcgcggctgtcgccgttgtgcgcaagcagcgcaatggcgtagtcgatctctttctgtaccgcgaaaggacgattgcacacgcggcagttgcacagcgcaaagcgggactgttgcaggaaatcttctttcttccacaccgccagttcgtactcttgcgacagtttaatcgccgccgtcgggcacacctcttcgcagcgaccgcagaagatacaacggccaagattgaactgccacgccagctcattggtcgcgagatcggtttccaccgtcagcgcgttcgacgggcaggcattaacgcaggcggcgcagccgatgcactgctgcggattatgttccggcttgccgcggaagtttttatcaaccgcaatcggctccagcggataagacgaggtcgccgtgccggttttgataacttttttgataaaggtaaacatggcgattccttatttcagcggcgagtttttacgctcaatgctgtagcgctcaagttctttgtacggcacgactttgctcttcttcttacgcacatcgaccacggtcatccggtcggtacaggagtagcacgggtcgaggctgccgataatcagcggcgcgtcggagacggtgttgccgcgcagcatatagcgcagcgtcggccagttggcgtaggtcgccgcacggcagcgccagcggtacagcttctggttgtcgccggtcatgctccagtggatatcgtcaccacgcggcgcttcagcgaagccgagcgcaaaacggtgcggaatataggtaaagccttccaccatcagcgggccgcccggcagattatccagaccgaaatcgatcatattcagcgaggtgtaaacttcgttgatacggactttcagacgagaaatcacatcgcagccctgctcgctgtgcacttccatcggcagcaggccatagcccacaaacgggtggtcggcgcgggtgtcgcgggcgtgaccgctggcgcgcaccatcgggccgacattactgaagtcacgggcaatttccgggtccagacggccgatacccacggtacgctgttccatattcggcgtgctcagcagcatgtccaccagctcctgcacgtcacgacgcatctgctgcgccagttgacgggtctggatcatgtcctctttgagcagatcgcggcgaatcccgccgatcaggttcagtccgtaagttttgcgcgcgccggtaaggatctctgccattttcatggaggtttcacgcacgcggaagaactgcataaagccggagtcaaaaccggtaaagtggcaggcgaggcctaggttcagcaggtgcgagtgcagacgctccacttccagcagaatggcgcggatcatctgcgcacgctccggcacctgaatgcccatcgcgttttccacggaagtggtgtaggcagtgctgtgcgcgaagccgcagataccacacacgcgatccgacaggaaggtgacttcgttataacccatgcgggtttccgccagtttttccataccacggtggacgtagaacaggcggtagtcggcgtcgataatgttttcgccatcgacgaacagacggaagtggcccggttcatcggaggtgacatgcagcgggccaatcggcaccacgttatttttcttgtcacccagctcgttaatgaactcgtaggtttccgcatcggtggtcggcgccgggcgctgacgataatccatactgtctttacgcagcggatagagttcatccggccagtcgtccggcagcaccagacggcgctcgtccggcagaccgaccgggattaaaccgtacatgtcgcgtacttcgcgctcaccccacacggcagccggcacgcgcggcgtaacggatgggaattccagcttattggcatccacttcaacgcgaacggtaatccagcacttcgtgccctgctccatcgacagcacgtaataaacggcatagtggccgcacaactggcgttcgtcattaccgaacagcaccgacagccacccaccctgctggtagtaaagaaactccaccacttccggcagatagtttactttcaccgtaatagtcagctgatctttggtctgccaggcttcgtccagcacgacgcccggaaacgcctggtgcagcgccgcaaggtattgttgacctaatttttcttcagacatgctcaaactctcttaaatcacgccgccagcaaggagacgaaggctaaaaacgcaaacccaaaaccggcccaggtcacgcgtgaagtggcgcaaaaacgcagtcgcgccatgctgttttcaaacagggcgatcaccagtacgccaacaatcagcttgacgacggcaatcaccagcgccagcagcagtccgcctgcgctgaaggtttccatctgtccccacggcagaaacacgccgacgaacatttgcaacaccaccagttgtttaaggctgatgccccatttcaacaccgcaaagccgctaccgctgtattcggtcaacggcccttcctgcaactcctgctccgcttccgccaggtcgaacggcagcttgcccatttcgataaaggtggcgaaggcgcaggcgcacagcgccagaatcagcggaatactgcgcgcgacaggccagtgataaatggtatcggcgatattgctgatatgagttgaacccgccacctgcgcggcgacccacagacccagcagcagaatcggctccaccagcacgccgagcatcgcttcacggctggcgccgatcgcggtgaacgggctgccggtatccaggcctgcaatagagaagaagaagcgcgcgatggcgaacaggtaaatcagggtgattaaatcacccagttgcggcaacggagatccaacggtgacgaccggcagcgcggtggcgatagtcagcatcacgccgaccatcacaaacggcgtcaggcgaaaaacccagccagaatcagcgggcgcaatactctgacgaccgagcagtttgataatgtcgcggtactcctgcaacacgcccggccctcggcgattgtgtagacgggcgcgcaccacgcgagtaataccggacagcaatggcgcaacggcaaatagcaccagcgcctgaattaacggataaaacacactcattttcaggctcctcgtgaaaccacaatcaccaccagcaccgccagctcaatcagcgccagacgacggaacagcaccgcggccgccgcgttctgccagcccggaatcaacgataccgggttgagccacttacgcagtttgagtaccggggcaaaggcctctttcaccggcatggcaaaaccgtgcgcggtaatcaccatcgactgctcatggtcgtagccgcacacccaggccgcgccgcgagaacgcgacggcagacggttgcctttgaacatcgccataatgatgaacggcagtagcggacaggcgaccaacagcagcgtgatcatcggctgcgatacggtggtgtgcgcggtttccagcggcaacggtaccgcagtggaaatcatcggcaacagccacggcgcggcaaccccgcccagtacacagcaaatcgccaatgccaccacgctgacgcccatcaggatcggcgcgcagctggcattttcagcttccttcgtgcgcggcgcgccaaggaacgtcacgccatacactttcgccatacacatcaccgccagcgcgccggtaatcgccaggccaaccgccagcagcggtcctaacagacgaccaacaaacgcaccgctgttgcccagtttgaagaaggactgataaatcacccactcgccggcaaagccgttcagcggcggcagcgccgccatcgccatcagaccgaccagcatggcgatagaaataaccggcatccgtttaccaataccgcccagtttttcgatatcgcgatgaccggtacggaaccagatgctgcccgcgcccagaaacagcacgcttttgaacaggctatggttcagcaggtgatagagcccgccggtcagacccagcgcgatcagtaccggctgattgagagcaatcccggtaacgcctgcgcccagaccgagcaaaatgatgccgatattttccagcgtgtgataggccaacaggcgctgaatgttatgctccatcagcgcgtacagaccgccgacaaaggcggtgatcatccctagcaccaacagcgccacgccccaccacagcggcgcattgccgccaagcagagatagcgtgaggatacccagcaacccgattttcatcaccacggtcgagaacagcgcggcggcgggagcgctggcgttggcgtgcgcctgcggcacccaaccgtgtagcgggataatcccggccagcagaccaaaaccgataacgccgagcagccagatatcggagcccagcggcagttgctgagcgcgttgatccagcagccccagatccagcgtgccgtagcgctgccacaccagccaacaggcgattgccagcagcagcgtaccgagacggcccagcgcaaaccacagtttgccctctttgctaccgccggtgaggaacacggcgcagagcgccatgatttccgccatcaccaccatcgtccccagattactggcgaccacggcgcagacggctgccgccatcagcaggttgattaacagcccgttggcttttacctgtggatggcgatgccagtcgatattgaacaggctgacgaacagaccgcacagccccagcgtaatcagccagatagcattcagcggcgtaatttgcagcatgtggccggtaaacggcatcacgccgctaaccgtaacggcgctggtcagcgcggtgaaccccgcgcctgccgtacacaggctgccgaccgcgccgccgataccggcaatccagccgctcagcgctttatgaaacgaaaacagaaacgccagaacggcggcggcggcaaaccacgcgacgccgctagtaatcagtgaaagtgaactcattatgcatccccactctgagcctgctgaaacaaggtgagatcgccaaaatcggtattaaacgtcagctcacgtttacgtttgctggcgcgggcgatatccgtgttctccaccaggtgtagcgctttagtcgggcacatccgcacacaggccgggccttgctcgtcaaagctgcacaggtcgcatttcaccgcgatagcgcgtacgcccggcacccagtcgagcaacgtactgacgcgcgcaggcgctggcggcgcgggcggcgctttcggcgtattggcgttcgccggaatatgcagcggacggctgccggaaaactcaatagcgccaaacggacaggcaataccacacagtttgcagctcacgcacaggctttcattaagctggacagcgccgtcaacgcgattaatcgcgttaaccgggcataccgtggcgcatggcgcatcttcacagtggtgacaaagctgcggcgcagattctttttcattcagcatcactttcaggcgcggcattgactgcaggccatgctggcgatgcgtctctgaacaggcggcctcacaggtgtggcagccgatacagagagtggagtcagcaattacaaaacgattcaccaggcattcctcaggtgattgtcatttttgacgaaaacatgccgttgaaatgtcattttcgacacttatcgacacgcccatccccaaaacattcatgacatggcgcaacgccacatcgcgaatcaaagcgggcaacgcctcaggcttataccgccgggctgtgtccctttaccaattgacgcaaattaaccggcgagttggtttctacagcggtatagaggctgtcgtaaacgctggcgattttttccagatagtgctccagcacctgctcgcgatcgcggttgttaacccgttcatcaaccttgccgtcgatatcgagctgcgcctgtgcaatcaattgtttatcttcgccatctttggtttcaacgtagtactcaatggtgtggctgttaaaaccatccgccaacgcgacgtaaatacgaaagtgctcaaacaggacaaagcaaagatccctttccggcgcgcagctcattgcgtgatgcaggcgcgctttcgagagggtgatcccctgaaccagcgagttgcagtaaatatgccactggtcctgtaggcgacgatgccgttgcgcgatgtaatcggccttttcgcttatttcccaaatagtcatgtcaggttacccgtttaacagagatgcctgcgttaagcattttccatgccaatttttaacttattgtttttaatggcagacgcgcacagttactgccgtttcgacgcggtgacgacatgtcatttcgtcatcgtcgacattaacctgccaggggataaaaatattggcataaatattgctttacaggggcaaccactacgggaggcgatatgcacgaaatcaccctctgccaacgggcactggaattgattgaacaacaggcttcagcatacggtgcaaaacgtgtgacagccgtctggatcaaaattggcgcattttcttgcgtggaaaccagcgctctttccttttgttttgatctggtatgccgcggcacgatagcagaaggttgtaaactgcacctcgaagaacaggaagccgaatgctggtgtgagcattgtcaacaatatgtcacgttgttaacccaccgtgtacgtcgttgtccgcaatgtcatagcgatacgctgcgaattgtggccgatgacggcttacaaattcggcgcatagagattgatgaaactgaagattaatgccggatagacgctcgcgtcgccatccggcagaaagcctgtaacaagaaaaagatcaggagtaagcgatgtgtacgacttgcggttgcgctgaaggcaacctttatatagaaggcgatgaacataatccgcactcagcgtttcgtagcgcgccctttgccccagcggctcgcccggcgctgaatattaccggcattaaaacgcctgactttgccccaagtcagaccgcagaaggcgatctgcattacggccacggcgaagccggaacccacgcgcctggtatgagtcagcggcggatgcttgaggttgaaatcgacgtgctggacaaaaataatcgtctggctgagcgcaaccgcgcccgtttcgccgcccgccagcaactggtgctcaacctggtgtccagccccgggtccggtaaaaccaccttgctgactgaaacgctgatgaaattgaaagaccgtgtaccgtgcgcggtgattgaaggcgaccagcagacagtgaacgacgccgcccgcatccgcgctaccggcacgcccgccattcaggtcaacaccggtaaaggctgccatcttgacgcgcaaatgatcgccgacgccgcgccgcgcctgccgctggatgaccatggtattctgtttatcgaaaacgtcggtaatcttgtctgcccggccagcttcgatctgggcgaaaagcataaagtcgcagtgctttccgtgaccgaaggtgaagataagccgctgaaatatccccatatgtttgccgctgcgtcgctcatgctgctcaataaagtcgatctgctgccctacctcaattttgacgttgagaagtgcatcgccagcgcgcgtgaagtgaacccggagattgaaattatcctgatttccgccaccagcggcgaaggcatggatcagtggctggcctggctggaggcgcagcgatgtgcataggcgttccgggtcaaatccgcgccattgacggcaatcaggcaaaagttgacgtctgcggcattcagcgcgacgtcgatctcacattagtcggcagttgtgatgaaaacggtcagccgcgtctgggtcagtgggtgctggtccatgtcggattcgccatgagcgtcattaacgaagcggaagcgcgcgacacgctcgacgcgctacaaaatatgtttgatgttgagccggacgtcggcgcactgctgtatggtgaggagagataatgcgttttgttgacgagtaccgtgcgccggaacaggtaatgcagctcattgaacacctgcgtgaacgcgccgcccttcttccttacactgccgaacgaccgctgcgcattatggaagtctgcgggggtcatacccacgcgatttttaaatttggtctcgatcagttactgcccgaaaacgtggagtttattcacggccccggttgtccggtctgcgtgctgccaatgggacgcatcgacagttgcgtggaaatcgccagccatccggaggtgattttctgcacctttggcgatgccatgcgcgtgccggggaaacagggttctctgttgcaggctaaagcgcgcggcgcggatgtgcgtattgtttattctccgatggacgcgctgaagctggcgcaggataacccgacccgcaaagtggtatttttcgggctgggctttgaaaccaccatgccgaccaccgccatcacgctgcagcaggcaaaacagcgtgacgtgcgaaacttctactttttttgccagcacattacgctgatcccgacgctgcgtagcctactggagcagccggacaacggcattgacgcctttcttgcgccaggccacgtcagcatggtcatcggcaccgaggcgtaccagtttatcgccgccgattttcatcgcccgctggtggtggctggattcgaaccgcttgatctactgcaaggcgtggtcatgctggttgagcagaaaatagcggccctaagccaggttgaaaatcaataccgtcgcgtggtgccggatgccggaaacatgctggcgcagcaggccattgccgatgtgttctgcgttaatggcgatagcgagtggcgcggtctgggcgtgattgaatcctccggcgtccacctgacgccggagtatcagcgctttgacgccgaagcgcatttccgcccagcgccgcagcaggtctatgacgatccgcgcgcccgctgcggcgaagtgctgaccggcagatgcaagccgcatcagtgcccgctatttggtaaaacatgtaatccagagaccgcgttcggcgcgctgatggtctcttccgaaggcgcatgcgccgcctggtatcagtatcgtcagcaggagtgtgaagtttgaacaatatacaactcgcccacggcagcggcggccaggctatgcaacagttgattaatagcctgtttatggaggcctttgccaacccgtggctggcggaacaagaagatcaggcgcgtctggagctggcgcagctgacggcggagggcgaccgtctggcgttttctaccgatagctatgtgatcgatccgctctttttccccggcggcaatatcggcaaactggcgatttgcggtacggcgaacgacgttgcggtgagcggcgcgatcccccgctatctctcctgcggctttatccttgaagaagggctgccgatggagacgttaaaaagcgtggtcaatagcatggcggcgaccgcgcgggaagcggatatcgccattgtaaccggcgacaccaaagttgtgcagcgcggcgcggcggataaattatttatcaacactgccggcatgggggcgattcccgccgatattcgctggggcgcgcaaacgctgagcgttggcgatgtgctgttagtcagcggtacgcttggcgatcacggcgccactatcctcaacctgcgtgagcaactgggactggatggcgagctggcgagcgactgcgcagtattaacgccgcttattcagacgctgcgtcatattgacggagtgaaggcattgcgtgacgccacgcgcggcggcgtgaatgcggtcgcccatgagtttgcggcgtcctgcggttacggtattgaattgtccgaatccgcactgccgctcaaacctgccgtgcgcggcgtctgcgagctgttggggctggatgccctgaactttgccaacgaaggaaaactggtgattgccgttgaacggcaggccgcagatcgggcgttggcggcattacgcgcgcatccgctgggacgtgatgcggcgctgattggcgaagtcgtggaacgcaaaggcgttcgcttagccggactctatggcgtgaagcgaacccttgatttgccacacgccgaaccattacctcgtatatgctagcagcctgttgacagcatactgtaagccggataagacgcatttgcgtcgacatccggcattaacgctgcatgaacgcctgatggcgctttgcttatcaggcctacggagtgtgtgaccagcgagtttgcggtcagccatccggcaataacttacgacttatacctataattcatttaccgttttcgcaccgttttgcggtattttcctggaaaagcaacatgtcgtatacacccatgagcgatcttggacagcaaggcttgttcgatatcactcgtaccttattgcagcagcccgatttggcgtcgctcagtgaagcgctttcgcaactggtaaagcgttcagcgctcgccgacagcgccggcattgtgctatggcaggcgcagtcgcaacgcgcacaatattatgcgacgcgagaaaatggccgtcctgttgaatatgaagatgaaaccgtactggcgcacggcccggtacgtcgcatcctttctcgccccgatgcattgcactgtaatttccatgagtttaccgaaacctggccgcagcttgccgcgagcggcctctaccctgaatttggtcattactgtctgcttcctttagccgcggagggccgtattttcggcggctgcgaattcatccgtcaggaagatcgcccctggagtgaaaaggaatatgaccgtctgcatacgtttacccaaattgtcggcgtggtcgccgagcaaattcaaaaccgggtaaacaataacgtcgattatgatctgttgtgccgcgaacgcgataacttccgtattctggttgcgattaccaacgccgtcctgtcgcgtctggatattgatgaactggtaagcgaagtcgcaaaagagattcaccactatttcaatatcgacgcgatcagcatcgtgttgcgcagccatcgcaaaaataagctgaatatctactccacccactaccttgatgagcatcatccggcgcacgaacagagcgaagtcgacgaagccggcacgctcacggagcgcgtctttaaaagtaaagagatgctgcttatcaacctcaacgaacgcgatccgcttgccccctacgaacgcatgctgttcgatacctggggcaatcagatccagacgctttgcctgctgccgttgatgtccggcaagacgatgcttggcgtgctcaaactggcccagtgcgaagaaaaagtgtttaccaccgccaacctcaagctgctgcgtcagattgccgaacgggtagccattgccgtggataatgcgctggcctatcaggaaatccaccgactgaaggaacgcctggtcgacgaaaacctggcgctcacggaacagcttaataacgtcgacagcgagtttggcgagatcatcggacgcagcgaagcgatgtacaacgtgctaaagcaggttgagatggtggcgcagagcgacagtaccgtgctgattctgggcgaaacgggaaccggtaaagagttgattgcccgcgccattcacaacctgagcggacgtagcgggcgcaggatggtaaagatgaactgcgccgcgatgccggcggggctgctggaaagcgatctgtttggtcatgagcgcggcgcgtttaccggcgccagcgcgcagcggattggccgtttcgagctggcggataaaagctcgctgtttctggatgaagtgggcgacatgccgctggagctacagcctaagctgctgcgcgtccttcaggagcaagagtttgaacgtctcggcagcaataaactgatccagaccgacgtgcggctgatcgccgcgactaaccgcgatctgaaaaaaatggtcgccgatcgcgaattccgtaacgatctctactatcggctgaatgtttttccgatccagcttcctccgttgcgcgaacgtccggaagatattccactactggtcaaagcgttcactttcaaaatcgcccgccgaatggggcgtaatatcgacagcattcccgccgaaacgctgcgcacgcttagcagcatggaatggccggggaacgttcgcgagctggagaatgtcgtcgagcgcgccgtgctgctgacgcgcggcaatgtgctacaactgtcgctgccggatattaccgccgtaacgcccgatacctcgcctgttgcgactgaaagcgacaaagaaggcgaagatgaatatcagcttattatacgcgtgctgaaagagaccaatggcgtagtggctggaccaaaaggcgcggcgcagcgtctggggcttaaacgaaccaccctgctgtcgcgtatgaagcgattgggtattgataaagacgcgttagcgtaacgggttgccggatctgatccggcctggagatgatgcgcgccgtaggcctggcgcttccccttcacttcttgcgctgatatttttccggcaattccggaacggggcgcttatcgtcgataaggtgccgcacggtcaggacaggatgccgccaaagcattcgcggacctgcccaacgcataatctgcttcatctcctcgcgtttagccggctgatagcagtgcaccgggcactgcttacaggcgggtttttcctcgccaaatacgcatttatcaagacgtttttgcgcgtaggcgaacagcgcgtcgtaatgcccctgcaccgttgacgcctgtgggcactggctttcatacagcgcgatcatttttttgatcgtcagtttttcacgagcgatacgtttaccaggcatcgtgctctctccgaacattaaggtgtatttattttacaccttatccctctttagcactatcactgcatattgtcgccatttcgcaaataagaattattttcatttatccataccttgtgctatataacatagcaaaggctatattcgatgattaattaaccacattgttgcgagggatactatgacgaatctacatcgtctgaaaacactcctgattgccggtattgtcgcgatactcgcgctatcgccagcctatgcaaaagagaaatttaaagttatcaccacgtttaccgttattgccgacatggcgaaaaacgtggcgggcgacgcagcggaagtcagctcgattaccaaacccggcgctgaaatccatgagtatcagccaacgcccggcgatattaaacgagcgcagggggcacagcttatcctcgcgaatggtctgaacctggagcgatggttcgcccgcttttatcagcacctttccggcgtgccggaagtcgtcgtctccaccggcgtcaaaccgatgggcattaccgaaggcccgtataacggtaaaccgaacccgcacgcctggatgtcggcagaaaacgcgctgatttatgtcgataacattcgcgacgccctggtgaagtacgatccggataatgcgcagatctataagcaaaatgccgaacgctataaagcgaaaattcgccagatggccgatccgttgcgtgccgaactggaaaaaattcccgccgatcagcgctggttggtcaccagtgaaggcgcgttctcttacctggcgcgcgataacgacatgaaagagctttatctctggccaattaacgccgatcaacaggggacgccaaaacaggtgcgtaaagtgattgataccattaaaaagcaccatattcccgccatctttagcgagagtacggtttccgataaaccggcccgtcaggtcgcgcgtgaatccggcgcgcattatggcggcgtgctgtatgtcgattctctgagcgccgctgacggccctgtgccaacctatctggatctgctgcgcgtcacgaccgaaaccatcgtcaacggcattaacgacggactgaggagtcaacaatgagtcaatctgcgattaccgttgatcaagtcacggtgacgtatcgcaacggtcataccgccctacgggacgccacttttcaggtgcctggcggttcaatcgccgcgctggtaggcgtaaatggttccggtaagtctacgttatttaaagcgttaatgggctttgtgcatcttgcgcagggcgatatcactatcctgcaacagtcagtcaacaaggcactgaaaaaaaacctcattgcttatgttccgcaatcggaagaagtggactggtcatttccggtgctggtagaagatgtggtgatgatgggacgctacggccatatgggctggctacgccgtcccactgcgcatgatcacgcctgtgttgacgccgcgctggcgcgggtggatatgcaggagtatcgtcacaggcagattggcgagctgtccggcgggcagaaaaaacgtgtgtttcttgccagggccatcgctcaggatggacaggtgatcctgctggatgaaccttttaccggcgtggatgtaaaaaccgaagcgcgaatcatcgatctactgcgggaactgcgcgatgaaggccgcacgatgctggtctcaacgcataatctcggctccgtcaccgagttttgcgactatacggtaatgattaaaggaaccgtactggccagcggccctaccgaaaccacgtttaccgccgcgaatctggaacaggcgtttagcggcgttctacgtcatatcgcgttaagcggaggtgaagagcacatcatcaccgatgacgagcgcccctttatttcccggcgcgtggccagcggaggaaaatcgtcatgaactggcttgttgagccgtttggctaccagtatatgctcaacgcgatgtgggtctccgcgatggtgggcggtctgtgcgcgtttctctcctgctatttgatgctcaaaggctggtcgctcattggcgatgcgctatctcactctattgtgcctggcgtcgctggcgcctggatgttagggctgcccttctcgctcggcgcgtttctttccggcggactggcggcaggcagtatgctctttcttaaccaacgctcacgcctgaaagaagacgcgattatcgggcttatcttctcctctttttttggcgtcggcctttttatggtgtcgctcaatccgatgtcggtgaatatccagacgattattctcggcaacgtgctggcgatcgcaccagcggatattgcgcaactggcgattatcggcgcagtctcgctgacgattctgctgttaaagtggaaagatctgatggtcgtctttttcgatgaaacccatgcgcgttctatcgggcttaatccgggtcgactaaagctgttgtttttcactctattgtccgtctctaccgtggcggccctgcaaaccgttggggcgttcctggtgatctgtctcgtcgtcacgccgggcgcgacggcctggttactcaccgaccgttttccacgtctgctcatgattgccgtcgtgattggcagcctgaccagttttctgggcgcatggcttagctactggctggatggcgccacgggtggaattattgtcgtcatgcaaaccttactgttcatcacagcctttattttcgccccgaaacacggtctgttagccaaccgtcgacgcgcccgcctgcagaaggagccgacatgttcttaacaacgttactggaaccctttcagtttgattttatggtgaacgcccttatggtttcggtcattgtggcgattccctgcgccttactgtccgtgtttttagtgttaaaaggctgggcgttaatgggcgatgcaatgagtcatgcggtattccccggggtcgtgctggcatatattgtggggatccccctggcgattggcgctttcattgccggattattttgcgctatcgccaccggctatctggacgataacagccgcatcaaacgtgatacggtgatgggcatcgtcttttccgggatgtttggcgcaggtctggtgctctatgtttctattcaatcggaagtgcatctggatcacatcctgtttggggatatgctgggcgtatcgctgggggatatcgtacaaacgtcagttattgcactgggtattgcgttaatcatagggctgaaatggaaagatctcctgctacacgcttttgacccgcaccaggcgaaagccagcgggctgaataccacactactgcattatggcctgctatgtatgattgcgctgactatcgtcgccacgctgaaatcggtgggcattattctgtcaatctcactgcttatcgcccccggcgcaattgccattttgctgacgcgacgctttgcgcgcgcgctgggattagcggtgagtctgtcagttattaccgcttttgcgggcgtttatctgtctttttatcttgatagcgcgccagcgccgaccatcgtggtattatttgccatcgtgtttattgcggcatttatttacgcaacatggcgcgacaggcgtaatgaaatcgtaccagaggcgcaaggttaacacttttttgcctgctattcaggaaacatacggtcataatatagagtagtcttatggcgctggaaggatttcctctggcaggcaaccttataatttcattacggtttaagtaaagacttatattcagctatcctttttttatgagcggatatagagagttttttatcgtttagcataacggcattgttatcgaatcgctcataaagcgtttcattctttttgtttactatactgcttcccgccgccggattggcctccacatattcatttaatcgttgtgcgccttgagtatgtttgtaaaaactcaccggcagatagcggtctgctttatcggacgggagaaaaggttcttcaccacacagacgttcacaaatattatcttcatgaatttttactaagttcataaattcaagctgaagttttttggcgagcgccaggctaaaaataccgcattcagaagagcttcgttgaatgtccagctcgaccatagcaaaataacaatcaggcagttgttcacgttcaagagctgctttggtcctcaacgccagtaaagcaggtccaaaagcgctacacgctgctggttcgaacaaaatcaccgatgtctttccgtccataactctaaaatcgacgactgaaatatggatacctgaacttcccatatttacgagaaatcgggcagattcaacgccttccattctggtctcctttatagaggaaacaagctcatggactgacataacaaatttaagatttaactctggatacttcttattggcctgtgcaacaagaaaaggcatcatttcgagatcggtttcctcgtaactgatatgaatccagctgccatctataatttcactttccagacgctcaacaatacaggtcaatgcttcggtgtttagctccccgctgacgtcaggctgaggcgataaactcgcccccatattacgagtcgtaggacttagcatacttttccctccacatgatagctcctgcaccgaaaatatcatctttaacttttcagatttaatatattgcctgcaaaaatatgcctcaatgattgagccaggctaccaaccacctccggatgattatatataagaattactactcaaaaaatcttttttataataaaagctcaacacatggtcataaatgataaaaaatattttaattcattcctaccgcaatcggtaacgcgcaattatcgtcaggtacagcagggttatgtgcaaaagcagtgcgctgtaaatgcgcgtctagtttcagtccccggaacagcgatagcggtgaagagtccatccccaaacgatacataaccttcttacgataaatactgacggtttttgttcccagaccaaattttttcgccagttcaattgccggatgtccggaggataataatatcagcagcgcatatttcgcctgcgtgacaccgggaggtagattccaccaggcgtattgattgatattaaacaatacctcttccggcgtctcgccggcattaaaagcatacgtagcagccacggttttcttttgtggcctgtggcagaaacgcagccaggcttccggaagacggagcttctctcgctccgagcggatagcgcaggatagttcgtcttttaaaacataatccataacgccaaaatattgcagcacacagcgatcgatataatacaagcgatctgccactaccaaaactttacggttctgcaaccgcgtcagcaacgcatgaaaaagataaacatgctcatgcgggttcaaagctaaaatcagcccggcgtccggcatatcggatagggaatgcaaaagtgcagttaatgagttacacgttttaacgcacttttccggatatttttgcttaaaaatagactgtagggcataacaattagtccagttaataccgtatataattacatttctcatttatttatccttttttgaaaactgaccacagcttcggtaatgatttttcttcctgggcgactactgcgcaagtagataacgccttcttactacaaaggtaataagaccagatacgttattacatgcgcaatgtcgttaccgaaatgaattccttttacaaatctgataatgattaaatttgctgttttactttactgtaatctcttagagtacaacgattgcccggcgcctggtggccatgtatgtctgacaatgaacgctttcgattccctttcattaactacatatcactggtgtagcgatactgaaatatacactacgattaaaaaaatatttggtatctgtaacgcaaacagatagtaacgtttaaaataatttcacaaatcaatggttcattgtacgcataaagctaagcggtgtaatcttaaaatgccgtttaaaaatagcgataaaataagaaggcgtatcatagccacacatcgtcgcgacttgtgaaatatttccagcccccatacgtaataattttatagcctgattcatacgagcatccaggtatattttactaaaactcacctcttcagcggccagttttcgcttcagacttgatacgctcataaacagctttcctgccacctcagcctgtgaccatttgcgggtgagatcgctgataataatgttataaactttctcttttgtcgtaatttttattgctcgctcaaggaaatcaaacccaccgggcttacgtacaaatgccgatataagatacatcaatgagaaatatgaataatcatgatcatcaatactcacattactacaaacccgtggacatgccacaccatgcaaaatagagtcaaaagtatcactcatccctggcaacaagtccgcatgaaaaaaatactttggtttcgtttttaatgatagctctcgatcattatagtttcttgtactgtaaaaaactttgtagaatttttgcattaagtcataggaaacttccagtgaagaaaaatcaatatgcccttctatttcgctcatactaagcgtgattgtttgatctttttccaataaaaataaacacggcgcagatcgttcgatgaactccccaaattcgttttcaattcgcaaactgcctttattaagtttaaacaataagcagtttgcgacataatagtctcttacgtcagctaatccatttattaatggaaatttgttcggctgttgaaggtgattattgctaatggcctcaactgatttattcattgaaggcaataccatattttatcctgtgtgctataaggaactcaaaatcgttatattcttataaacaaataattaaaactcacagagatgatttaaatccgatttttttattattatagccaataattacattccaacgcgcgttcatttcgtcacaaaaagatacccttacaaactttatgcacaattttgtaatgaaagcttacaatattaatataatcatttcagaataaaacggctggcagacatcttaataatccatatacatcaataagatagacacactggcatggtgcattttctgcattatttgctgatatatacaccataccttatcacaaatcgccagcaatgggggttcaccagtcaattgcctctttgttttccccgcccgataaaataatctcctgcatccaggaggtcatttgtgactgtgcgttcattgaaccaactaataccccgtttaaagcctcatataaatgggtgcccggttcaacttttgctaacatgttttgtagcatagccgtttgctgctcaaaagaaacaaaagccgaatcaccactgttaggatctttgaaggcattcatctcttgataaatgctatctttaagcgtttcagaagaggctgactcaggaagcgccaaaagtcgttggtagaatgcatcataaagatcaacgtcgccgccattgcttaaaggcgcgctatccatattattcagcatagcggccctggcactcaacgaaaccacacccgtcgcttcagtatctgctgtcgggaccaaataagaagtcggaatcgtacccggtatcaccttataacctccgcttgcgtttttgtcttccattcatcaataagtgcgttaatggcgttatcagaaattgtccggcagtcttgtggaagttcatcaagatgatgcttaatgacgcctactgccgtttcaacaaattgttcaggtgaaaattctgcgatctgatcgccgcaactcatgataaagcgctgttcctggtgatatttaagattaaaagtgcctggccagttctccataagcaacaccatcagtttttggtgatcttttttcgcattaactggcagtgttaaaaaaagttgcccctcaggcttatcgaaatcccttagccactcatccaggacggttaaaagcgtttcgggatggtcgaccgcagctgaaaataactcgcgggcataaatctgtattttttccatccacttccaggccattgtctgattatcagtaagataagcggcgacctgctgtaacgcgtctatcattccctgctcgtaaccttcctgataggcgtacatccgcaaggtctttgcctcttcttccgcctctcgcaaaatacgcttagcccgttgatgcgcctgctgttctaatctttcaatagagaaataacgttccagcgttttacgctttatcagtatcccctcaacaggcgaaagcggggacggtattgggatatttttgagcatattgtaaggccagtagcaaaattgacatttctacagcatcctgcttcaatgcctcctcaataaatggaggaaaaagcaaaggaaaacgctgtgctaaagattcaggtaaaaattcatttagggcatttaactgtgcatacccgacgctaagtaaaaaccggtgattcggcgccttattgcagacagataaacttgttccctgatgcattgccaaaaatgcttgcgcccaatccggcaggccaagcaaggctccctgccttgccagatcggctctcagtttatggcaaccgagtaaatacgctacttgcggcagtcggcgccactgacgcagccacagctgcgtcagtgagttttgaatacactccttttctccgttcttaagccgccatgccgccagtattaactcatttgccgccgccctggcggcgggtctgacaatcatttccggcgctatctgcaaccgctgaggatggatatacgataacggatcaaaaatgattctttgccagataatgggtaatggctgcctattcatttgacgatttcgccttatcatcagccgttatgcctttcttattgcgggcataatggtttttgtaataccagacgccaaagcctgctgacatcacggataacaaaataatcaaaacaatccaactggttgcaaaagaattacgttttactggtgtgccgggagcctgtaattgggcatcagaacgttctgacaacacaacagaaatgttgtcataatccacatcggcaaaactattctttaagaaacgcttgatatcgctgatctgatgcgcaagcggcgaacctcgttcatatacggctaatgccgacagatgaacaggttttggcgggcggccattttcaccagcatcaatatcataactaatatggaccctggcggagagcacgccctccatcgtctgtaatgactgttccagtcgctgttcaatagccgaatataacctggccttttcagctcgcggagacgataccagcgaatccgccgggaacatctgcgctatttccacccgtggccggggaggaagctgataagttttaatccagtacaccgcagcggtaaaatcaggctcagcaacggtaatgctatagcccaattttccgctatcaattttattcgcctctatattgtgcatttgcagaacggcaatgacctcattagcctgttcctggtccagtccttttaaaagatccttatccttacagccggcaagggtcattaccagcagaaaagtatatagatatcgacgaatcatgagcgtaatagcgtttcaacagccccgactcctttacgagtaagggtactgaccatagaaacatacaggttataatctgaaatcatctcttgcgaaatagccagctctttaggatccgtcaccagattagggtcctcaatcctgttggtaatcgtctgtttatccacagccgtggcaatcgccgaaccagaaaaagcctggagtagccggtcatccagcgagacaatgtccgtttccatagacctgatattgaccgcctgccctataacggcattctcagggacaatagttgcaatcgacataatccaccttataactgattaacggaagttctgaataatggcagcatcaatatccttaaagacttttaccgtgttcgattgcgcgttacggtacaagttatattccgagagcttactctgatacgccgccagtagcgccggatcggagggttttgctgctaatttatccagcgcctctgttacctgcgtttgtagattatcaacgcccgtatcaaattttgctgagacgtcatccagatagcctgaccaaggtgttgccataatgacttccttatttacgttaaattaaagtgggcttgggaaataccaatggcctgggctcattttgatataaccttccgccccgtactgaaatgagcgccccttgagccagtcatcttttaattcgatcgcaaactgcacatagcgtcctccccatgtgcggtaatagctatcgacaaattgacgggctctgagtatttctacatcatcgagcgccccctgaataacaaacgttacgccccccttatgattcctgcgggaataaggtaacgcctgctgttttagccccgcttccgcctggcctgctgcggtaacatcgtccatcaacgtgatgttaaccgaatccgcgtaaggcattagcgctctcagcttttgacttaacacctcgagctctttcttgctcatcgtgtttcgctggcggcttagccagaaaacgggtttacgcggctcatcgaaatgaatccgataataagccagctgcggataataggtatccagccagatagagatacgcttattttcttcgttttcgttaatcactcgcgcatttttatcataatcgcccctcgctaaaacctgacgagcccacaacgtatctctttcattttgcgcagcgacatagagcattttgtcccggcctggcaacacctgaaaacgctccttctcctgccccaataacgaatcgagctctgcggcctgccgctgcggcgagttaagtatccataacgtccccacagtcccaattcccaatataaaaaacccggccagtgctgctacaattccgtttttaaaacgcggctcgttcttttttgcagacgtttctaacttctcaggctgctcgggcacccacggctcgctttccgggcgaatcaggataagcaattcaccgacctgtattggcgtatttaattgcaccgaacgagattcagaatttccttctttcagctcatggagtataatttcggtcgcatccgtatccacctggatttcaaaatttactccgccatggtccagcgggataaaaaagctatcggcaggtatatcagggagttgacctgaagcagtgagcgcatcactctgacctaccacaaagagtgttcggcctgtcagcaatggaaactcacagccgttcagtgagctgttaagtaatcgaactatgtatggccctgggcttgttatcgtcttctcttttgatgtttccatatatactgttagcgatgtctgtcgttctcgatagcagcagattaccgcacaggacacagggattcctgatgaaaatagaatgaaaagtgagaaataaaatcaatttattctgtataatgcgtctcaacacatattaaaagaaccatcatccccattggggcttaaactactgtagataaattacccaaatttgggttcttttggtgtaacaatcagaccattgccaacacacgctaataaagagcatttacaactcagattttttcagtaggataccagtaaggaacattaaaataacatcaacaaagggataatatggaaaatgtaacctttgtaagtaatagtcatcagcgtcctgccgcagataacttacagaaattaaaatcacttttgacaaatacccggcagcaaattaaaagtcagactcagcaggttaccatcaaaaatctttatgtaagcagtttcactttagtttgctttcggagcggtaaactgacgattagcaataatcacgatacgatttactgtgacgaacctgggatgttggtgctcaaaaaagagcaggtagttaacgtgacgcttgaagaggtcaatggccacatggatttcgatatactcgagataccgacgcaacgacttggcgctctctatgcacttatcccaaacgagcagcaaaccaaaatggcggtacccacagagaaagcgcagaagatcttctatacgcctgactttcctgccagaagagaggtatttgaacatctgaaaacggcgttctcctgtacgaaggatacaagcaaaggttgcagtaactgtaacaacaaaagttgtattgaaaatgaagagttaattccttattttctgctgttcctgcttactgcttttctccgactcccggagagttatgagatcatccttagctcggctcagataacgttaaaggagcgcgtttacaacattatatcttcgtcacccagtagacagtggaagcttacggatgttgccgatcatatatttatgagtacgtcaacgctcaaacggaaacttgcagaagaaggtaccagctttagcgacatctacttatcggcaagaatgaatcaggcagcaaaacttttacgcataggcaaccataatgttaatgctgtagcattaaaatgtggttatgatagcacgtcctacttcattcaatgtttcaaaaaatattttaaaactacgccatcgacattcataaaaatggcgaaccattaacattttttgtatctgtcacttaagtaaagatttttattaaaattgtaataatttaaaattcagactgcgcattaacacgctctatcaggatgggaggctattcaatatcattgttctgtccggaagacagcttatactgatatctatggtaatttaaagtaaggctgattatataacacgatttttgtgaacttgtcatcgctatgatgactggtaaaacgatattgccttattcacagcgtaagaattcgtccagatgacactatctccttccggctttaaccctgtggattaaggccggcattttattcatatttatacatcatccgttccctctgagaactatttgcctgaacggtttataccgaaacagtcacgcttgttagctttctgccaggcatacctcctctcttcctcctgatatcgatataatgcctggagccagcctgaggatgatactgctcataaccctcctgcctttttgacgctataactgaagggagtaaagaaaagacgatatcattattttgcaaaaaaatataaaaataagcgcaccattaaaaacagtctttcatttatattttggaacctaagacaaattacactcttaaactttcaacgaatggtcatttagtggaaatcttcgagaaaaatggttctgatggtgtaattatcagaccattaaccatgaagatataataagcagcatttacaccccaaaaaaatgcagtaagatagctacaaaactaatctctattgcaatgaggccaagttaaatatgtaaatatttagatgcccggcgctgactctctctgcaccaggatatacggcagcgtccattcgataatcacagttagttataacaatattattaccaacatgtcagttatttaaagcacaggcataagctaaataatcaaatgttaaaaacatataaacccgagcccgtagaatatgacattaagctcataataaaagctcaacctgaccgttagtactaacagcagaattactgaaacagtagattctatcctaacgacttgtattagttattataacttttcaccctgtaagagaatacactattatcatgccacattttaatcctgttcctgtatcgaataaaaaattcgtctttgatgatttcatactcaacatggacggctccctgctacgctcagaaaagaaagtcaatattccgccaaaagaatatgccgttctggtcatcctgctcgaagccgccggcgagattgtgagtaaaaacaccttactggaccaggtatggggcgacgcggaagttaacgaagaatctcttacccgctgtatttatgccttacgacgtattctgtcggaagataaagagcatcgttacattgaaacactgtacggacagggctatcggtttaatcgtccggtcgtagtggtgtctccgccagcgccgcaacctacgactcatacattggcgatacttccttttcagatgcaggatcaggttcaatccgagagtctgcattactctatcgtgaagggattatcgcagtatgcgccctttggcctgagcgtgctgccggtgaccattacgaagaactgccgcagtgttaaggatattcttgagctcatggatcaattacgccccgattattatatctccgggcagatgatacccgatggtaatgataatattgtacagattgagatagttcgggttaaaggttatcacctgctgcaccaggaaagcattaagttgatagaacaccaacccgcttctctcttgcaaaacaaaattgcgaatcttttgctcagatgtattcccggacttcgctgggacacaaagcagattagcgagctaaattcgattgacagtactatggtttacttacgcggtaagcatgagttaaatcaatacaccccctatagcttacagcaagcgcttaaattgctgactcaatgcgttaacatgtcgccaaacagcattgcgccttactgtgcgctggcagaatgctacctcagcatggcgcaaatggggatttttgataaacaaaacgctatgatcaaagctaaagaacatgcgattaaggcgacagagctggaccacaataatccacaagctttaggattactggggctaattaatacgattcactcagaatacatcgtcgggagtttgctattcaaacaagctaacttactttcgcccatttctgcagatattaaatattattatggctggaatcttttcatggctggtcagttggaggaggccttacaaacgattaacgagtgtttaaaattggacccaacgcgcgcagccgcagggatcactaagctgtggattacctattatcataccggtattgatgatgctatacgtttaggcgatgaattacgctcacaacacctgcaggataatccaatattattaagtatgcaggttatgtttctttcgcttaaaggtaaacatgaactggcacgaaaattaactaaagaaatatccacgcaggaaataacaggacttattgctgttaatcttctttacgctgaatattgtcagaatagtgagcgtgccttaccgacgataagagaatttctggaaagtgaacagcgtatagataataatccgggattattaccgttagtgctggttgcccacggcgaagctattgccgagaaaatgtggaataaatttaaaaacgaagacaatatttggttcaaaagatggaaacaggatccccgcttgattaaattacggtaaaatctgagagaggagatatgcattatttttttatcatcgtaatctggttgcttagcataaatacggcatgggctgattgctggcttcaggctgaaaaaatgttcaatattgaatccgaactactttacgctatcgcccagcaggaatcggcgatgaaacctggcgccattggtcataaccgagatggttcaaccgatcttggcctgatgcaaattaacagcttccatatgaaaaggctgaaaaaaatggggattagtgaaaaacagttgttacaggacccctgcatttctgtcattgtgggcgcctccattttatcagatatgatgaaaatctacggttatagctgggaggccgttggcgcttataatgccgggacgtcgccgaaacgatcggatataaggaaacgttatgctaaaaaaatttgggagaattacagaaaattaaaaggaatgtcagcagaagagaaaaacaaaagactttctatcgcggcaaacaaataattatacagaaatagcttactttcagatagttctaaaagtaagctatgtttttatcagcttgccgtcgtcataagcaactgggcttgcattgcttttagttgtacaaactgtgaggcgtcttccagcattctattgttccgtgaatcccggaaatctgcacgtacctgctccagattactatgaggattatccttaagtacaagggccgccgccatcgttccggttcttcccactccgcccagacaatgaatcatcggtaaatgcttatctgatgaactacgccccggcgcgccattttggttactatttttcaccctatccgccaggtattctaactgatccgtagacggtaacggctggtgatctggccaatttttcacatgcaataccgggattgtataccgcttttccccgcaggacagttgcatattgtattggtctatcgcttctccctgactggctgagctcactttttggctgttggtatgcacctcgccaaaggtgtagctccctctgaaatagggtggtaattgttttgcctgcatctgatcttccgacgttaacaccaccaggcacgagcattctttttcaagaagcattttcatatgcgcttccagcgcatccggcgtattttttgggtacgaaccggctaatgccacaggcttaccgtcaaaagttaacgtattcactggcacaggcattccatcgctcagtttcacctgggtttgctgattaattggaatgctgctgaccgcaaatcgtgccaggcccagtgtcggtccgctcatcgtctgtggcattggcgcgccggcttctattttctcaagttcagctgtaacatttttcagttctttagcaataacgtgaattttttttacagcctgggttaattcatgagtagaggctttatcaacccacctctcaacctctcctccacaggttccccattgtgagaaccgggctacaccgacctgaatatttgttaacgttgtaacataatcattaagttgtttagcctctggaattttatttaaattctgtaaattcgtcattaatgaacgcagcgggccgttacctgaagccatctcctggaagttttctcgcaggctatttccatccatttgttccagttgcggtaatgttcttttaagtccctttagcgcgatatcgagtaaaggttgcttactttctgctccaacatcgttatttttttctgccacttttgtatcgccgccttttatgactaaagcggcattcctgacaccaacattatccttgctcttaataaggtttataaacccttcgtcagcagcttttacacactccgtgatctgcactgctaaacgttgggtaaggggtttgttcatatttatacgggacattaacagtgcgtcattaaccgctgtttccccatatttttccgttagtgcatggagaaatgtctgtaaaatcttttggtcctgtactctgatattttccgtatgtttttgcaccacttcagtgtttttaaataacggcatttttccaagccaggttaatacttttgacgaaaatttttcaggcgcaacatatgccttatcagtattttccttagcaatataaagtcgggcatcattcgacacaccaacttttgaaaacgaagacaacgttaaattattcaattttctctcctcatactttagcatattcctgcagtatgtttttgagcgcttcctgctgattcacaaatgactcaagctgcgatataatatggtaagtatttgtcagatcggtaattgcatgtataagcaacaacgtctctgcggcatcaatatacgctaacgtaccttcattattcgcagccagttcaccattaatcaccataatctgccgccagatagaatcgccacaaacaggcgataacggtataatcataccgttcaataaccagatatcatctttagcttcaatagacgtaaaaatatcgctatcgagtaataataagcactgattgttgtcgtcaaaagtgagcggtaaacccaatttctcaccaatattagcgataatatcctggtgtgcttgcaatttactttcctcttgaattatatcttttataagattgcttcttcaaatttaatctggttacacaatgtcttgatactttttcgcgcccatcgccgggcgcaatatttctctcctttaatccagtagaatagccattcactacgcatcggaacacatatcagcagctccttcggatcattttcaacatgacgtaacttgcctttaataacaaaacgcgaactgtcagcaatatcatcatatattgcagccatacctgaaccgggtactacatgtgtgatgattttcataacaattaatcttattcaattgttgtcaagcgagagaaaaatactacaccctggactcaagactttttttaacaacacggcatatatccgcaaaggtcatcatatcaggaagatcgttttcattgcaactaatgtcaaactcctcactaagaccaaatacaatatcaattaaatccaatgagtcagcgtaaagatcctcaaccagatgggtctgaccattgatactatcaacatcaacggcaatacaagaggtgatcacttttttgactcttgcttcaatatccatattcatcgcatctttcccggttaattaacgctgcatgtgcaagccatcaacggtagtaataacccgatccacgccaggtttattcaggtatgactcgtaagccgggccagctcgccagctaccgtctccgataaggccgtccagcacattacttaacacatagtcagtttccccttttagcctggtcagccccgcctctctggcaaactgcagtgcaatctcagccagtttttctttttgtggatgatgagtaatgacctctttgagagtctccattttcgctttcaattctgggtgcttgtcaatatcgctacattgcgctttcaacgctgcactctttatcgtgtcattgggtaatatttccgcacgcaagccgtcaaacgctctgcgtacagggaacggtgtggaggtatctggctccagggctttacgtatcacacccaaaaacgtctcacgggcgtcgaaatgcattgaatgcatattcgtaacgctcggtactgttgagaggaaactattttgcttaaacttcaaaccagaaaatgggccagtcttatctgtctgactattatcattatcggtcgtaccggctttattacctgtaattaccgtcgtgtctgattgtaaggtatcggttttaacattctcgacgccagccagttgactggcaagcggcttcacattcacaatctctgccgtctggctttgctgtttattatcatcaacgccgtgcaccgtggcctgtaccggcttgccgataatgctcttgctggttacgccatcgacttcatcaaaagaggttgtttcacccgtagtgcccttttctgacgtgaccacctttccatctttactttcggatgaagcgttggtcacagcctctgccgtcgcatgagccgtgacgtcaattttacccgcgatgccatggtcaattgcccctgtgctggcgctgtgtgccgtctccgtttgatgcgtagtcgaatccacacgcgaatgactatgacttacgttgctgctgttagtcgaatggtgtgactcgccattgcgttggctgttatcaataaatgttcggctattatcaatcgtcttccggctattatcatggttgctattatcgatatggcgctggctattatcgacatggcttcggctattgttaatatgcttactgttatccacgctatggttactgctatcaatattaatattgatattaatacccgtaggttctgcttttttcccaccatcaggtactggtccagccgcaggctccggaattttagggtcaggcagtttatctgcaggaatttgtgcaaaaacattacgtagcagcaggggtatcaacgtttgcatttcaaggtgccgggcttcccgtcctacgctggtaccctgctcttgcgttaatttttggtggcacatatcaagcgcctcaacagccttcgccgccgctttgtcaacaaggtgcgtaagattgctgcgggttaacggatctaacgtacagccaaagttatgttcaatgcagctggcaatatagggcatcacctcctgcataacaagattcgtcgataatttacttaattcaccgccagtgttatttttgataatatctaacagctgcttttccaggttttccagcttcgcttccgctttctttgtttctggcagccatggcccaaaagctgacttttctttcaggccatcttttatgatttgcgcggtatactctgcccccaccttcatcagtagcgtcttcgcctcaggagaatcactggtggcgttgagcgctgaacgaaagagcccggcaaactccattatcgctttcttaccggcgacattatttgaattggtaaaaacttcttttaacgcctcagcgtctttcccgcatttaaacaatgcatccagactcgcctgtttgatcagcgcgggaaaatcttccagttgcgggcctttaatttcccctgacagcgtcgctgtggcactttctctgactgcggaaagattcgccgcaagattcgtggcctgcgttttgatctcggtctgcatacctggcattatgacggggggctgagtccttacacttgtaaccattattaatatcctcttctgttatccttgcaggaagcttttggcggtttccaggctgctacttatcgtactgctcagcacttttaccaggttgtcgtacaatgaattggcattgctatatttttgcgtcagcgtctgtaatgtggttttcatattttcttcctgcgctttaaaacccgactgccaggcttgatatttggcgttatccatttcgagttttgagtcttttcccggcgcgcctaaaccatcaatatcctgaaccattttttgtaatggcgtcagatcaacggtgacgacataaccggatccataagatttcaggcagctattcggtaaattcaattcactgagccactgtctcgcttccgcttcagtggctactttaacgccgctgcctgactgcgctggaaataaaacggtattactgtttatttgattatatttattgactaaactgtttaaatcatttttgagtgaggtaacatctagcttaacggtattaccgtccttacctggtaataaccagcctcccattttggaaagaatatcactgaaggcctgataaaaatcggtatagactgcgacaacgttttcataaacgcccagatagctgtcacctatcgccgatatattttgggaaaccatatcccaaatctcagcatcagaaatggttgttctcggctgcgccataggcgaagcgctaaataaggccgacgtcggcgcagaaaacgcgctccgcaggttctcattttgttctgcggataatgacacgccggacttcgccagcgcattcaggctgctggtcaactgctggcgcgccagcgtgcgctcgtcattattctcttcagagatcggtggcgttgactgcagcgtctgctgtgcctggtggattttagtagccgcctgcgataatgaaatgatatctgtaccgcgatgttctgtggtagacggtaccacggcagtctcgacgtgctcgctcgccgagggagtctgcggccgttcggcaacgatccccggatgaggagaagcggaataattttgaatattaagcataatatccccagttcgccatcaggagcgcgattaaatcacacccatgatggcgtatagatgacctttcagattaagcgcgaatattgcctgcgatagcagcgagtgcggatgctttcgactggttaatgctctccattgttttcagcatttcctgaatcaggctggtcgatttacgtgaactttcacgggcttcgtccgatgcggtgctggcaacccggttattcacctggctaatttgctgctcggaacgttcctgagtagcggcgtactgcccggacgcccctgcaataccaccgaccgtgaccgagttcttcataatcagatcgcccgtcatctgcatcttgcgcgcatcgattcgggtcatatccatggtattctgctcaagacgaatatcggattcgacagactcaagacgtttcgacagaatagcctgatgttcaggggagatttgtttattactgtctttaatacccagactttccgtggcgctggttccggcattagatttaagcgtcgcatcattaagatttttcgtcgcatcggtaccggttttcttcatatttaacgatttcagagaatcgacgccttcagcaccgagtttgacgctattctgcccgttcagcacgtttttaatactgtggctttcagtggtcagtttatcgatcttcgcggcattatgtttaagcgcgcctctttcattctgcagccccttatattccagtttggcgcccacgccagtgatccccaactgaagcgcgctctgggaaatactaccggacaacgcattcatcccttcgcgcatcatggagcttgccgtcgttttagctgcatcaaaactgactaatgacaacttaccagacagtttgctatcagcctggttcaacgtcagcattaacgtattcgcggcagccaacagcgcaacggcactggaagacattccgctaatatcaaaaaactttccgacttctgcctgctgctcgcgtaactgggtttgcacaacctcattcgctttagtcgtgacattatttgccagagcattcaaatcctgattcatgtcggtattttgaatactggcttttaaaaaggacgtgatcgttccgggggtttgcgttaatacccctggcgcaggcgcgctcagtgtaggactcaaccccaggtcactgactttactgctgctaataccaatactattcagaatatctttagcgctaacggattgcgaagctgtctgtgaactattctcaacagaatgattatttaaataagcggcgggatttattcccacattactaattaacatatttttctccctttattttggcagtttttatgcgcgactctggcgcagaataaaacgcgaagcatccgcattttgctgtaccgcagaagacatggctttttgcagttccgccgttaccttctggttttcaccaaatatttctacggattgtttaagccactgctgaatctgatccatggcaaaacgggcgagcataaaatcagcaagcgcctcgctggcatttttaataaatacgccctcggcaacaccaccggctgactgggctgcggtattcgtgacttccatgcccaacgccactttatttagggtattacctaccagctctttacttaaggcattcgtttgcaggcccatcttgctacccacattacccagaccgctagtaatacgttgcatcccctgggtaaagagtttgctgccgttttgcgccaactgtttcagcacgttaggcaccaacttcttaatcgtttcgcccatcattttgctcagcgcgttacccagtttcgccgccgcgcctttcccgacaactgcgaccaccacaatgaccgccaccatggcaatagcggcgacaatcgcaccaacaatgctgccggccatctctgccgttttcttatcgacgcctaatccttccagcgctttggtaatcgccttgccaatcagctccattaacggcttcagcacatgctccataatcgggtttagcgcctgctgaataaacgacactcccgtcgccgccttcacaatttcatcggccaccattaccgcaagtcccaccgcagccagcgccagactcgccccaccggtaaaaacagcggccacaacgctgacaatggttagcagcgcgccgaggactttcccgatacatcccataatgcggttcgtttcctcggctttgcgcgtctcttcctggaattcagccgatttcttttccatctccgcctgacgcccttcctgcaaggcgttgaaaagcgcaagatcgttttgcaggctttcttccgtatttttgcccacaatctcaataaacatggccatgagcatagtgaggcgggcgacatttgacagattatcctgctcaccctgggaaacctgattctgagaggcggcattagccgttccctggaatttggtcagaatgttatccgctttctcggctttcgctttggcgtctgtgcctgctttaaccgtcgcatccgtggccttatctaaggcctctttcgcctctgtcgcttcttttccggcctgttctaccgcggcttcagcttgtgcatagccggggtcagccgggtccagcgattgcaatttattttgcgcctgcgtcagttttttggtcgcagcgtcataaacactcttggcggtatccgtctttttgatactggcttcatagagatccgtcgcctcctgagcctctcccagagccgtctggaattctttcgatacctgaatccccatctctttttgtgactcaatcatcgcctgccataccgccagacgagactccagttgagacagcgaaacatcgcccagtagggtcattaacttgccaagcagtaatgtcaattgcccttcgctggagagtttttcccgggcggcgtccgtaggcggctttagacccaccgtattaatagcgctctcgccggactttgttccggctttaaggtcgcccgctttcgttgccaccacatctttaaaagctttatccgccgcttttaaaaagtccgtgttcttacgaacgccttcaaaagccgcctcagcgaggcgcggattttgggtatatccgctacggctaatgctacttgcgtcatttaccataattattccttttcttgttcactgtgctgctctgtctccgccgtttttagcgcctccagatagaccaacgcttttgcccgcagagactcatcttcagtacgttcattgacaagttcaaaacactgtctggcttttgctgccttacgcattaataattgacactgcccggtaaaaaaaacggggcgataatcatttttaagtaacgtaaacgctactgcataaaggtcacatgctttctgaaattgttttttcagttggcatactgccgccagtcccatggtgtaatcgggattgtaaaaatcataaatgcataagaaacgaaagaacgtctcagcttcatccagtcgtccctggttataaaactcataagcatgagcatataaaccgtccatcatatcttgagggatcccatgaacgtcttttagcgtggcgccttcactaacggcatcccaaatcatttccgcaacacgttcttcgctgacattattttgataatccattacttactcctgttatctgtcaccgactttgtagaacttaacgactgcgtttatctgatgcagttattaaaccccgacggtggttagtgaacattcaaaaaacgcccaatgaatacatcgctactgccttacgcggctcaatgccgtacctcgttttcttgtggctgaataacgtctttgcccgcgttttctacctcttccagccaaaccagaagacgtaaaacttcatcaatttcttccagactcaccagatcataacggcgatgggttttgaaaagactgcgcgccagtttgatatcgacgatcacaggtacgccaaccttctccgcataggcgcggacggccagtgcgcgctgattcgtttcatacaccgagatcatcggaatcggcatcaattcgggtttaaaataaatcccgatcgtaatatgcgtggggttggcaacaatcaggcgtgagttttcaatatcagatttcacctgttcagacagaatttccatatgaacttcacgtcttttagatttaacctctgggttcccttcctgctccttcatttcacgcttcacttcttccttatccattttcatatctttcatggtcaggaaatattccgcaatagcatccaataataagacaatcaatgcgcaagcaaggcaagttaataccaatgcgaggagaagttcacgccaaatgacggcaatacctacaatattgccatttagctgagaaaagatttcaaccttatatttcttccagcaaatgatggcggccaccacaaaggatgagagatacagtagggttttgaccgtatctttaaccgtgcgcatactaaaaagtttttttgccccttctaccgggtttaacgccgataaattaggctttaatgcttctgtcgccagcacaaaaccggcctgtaataacgccggtaatgcggaacacactaagcagagcagcataaatggaatcagatattttaaccctatcccaaaaacggccaaactgtagtcagccatgctctgatcaaaattatccgcaataatgatcttaattatccccataaactcattaaatgagccatacgacaccagataggcaattcctcccagcgtcaggcaggcgataatgagatctttacttttaaatgactggccttttttagcggagtcttccagccgttttttagtcggtttttctgttttattcgaggacatgcgtcgcccctcgctcgtaaaaccaactgcttaaccctgtggcctggaaagagagtcgcagtacattgtccggtagtaccggagagaaataaagcagcataattaaaacggcaataccgctttttaccgtcagtgaaatcgcaaaagcgttcatttgcggagcaaagcgcgacaataaacccaggaatacttctgacagcaacagcactaataccaccggactggccagaaccaaggcgttttgagccacctgattaataaacgttaatagcggcggtaatgaaggcgtgcactcgttcatcggatcgcatagctgatagcttttatttaacacgtcaaccatcgtgaccagaccgccgttttgtaaataaacgacagcggcaaacatattcaggaaattagccatttccgaggtatcaataccgtttgccggatcgatactactacttagcgttgcccctcgctggttatcgataatacaacccagcgcatgcataacccaaaaaggccatgacagcagacagcccagcatgacgcctaccgccgcttcttgcagaactaacgggatcatcgccaccgataaaaacggcggcgcctcgttcaatgcatgcggccatactcccaatgccaccaggatgataatggcgtttctcggcgcaccgcttaataccccgctattcaaaaacggcaggaagaaaaaaatcggcgccacgcgagcaaaccctagcgccgcagacgcaaccaggtgatgaatttcaaagtacaacgcgtaaaacattttttaccccttagccaacgccaggaatatcacctgacgcccgtaagagagtaaaacttcgccataccagccagacagtaaaaacaagcataaacacacgccaagtaatttaatgccaaaaggcagcgtctgttcctgtaattgcgttaccgtctggaataaccctaccaggaggccgataatcgttgcgacaatcgtcggccaccctgacaggatcaaaacaagatagagcgccttattacctgcaaacactaaatcatccatttaactatcccgtctcgtaatgatgtcatgttgcaatgtccatatactgtaatatcaatcccttagacagtaaggtccagccatcaagcgcgacaaaaagcaccagcttaataggtgtagatatcgtcaccggactcatcatcatcatccccagcgccagtagcacgctggataccaccaggtcgacgacgacaaagggcaaataaagataaaaaccaattttaaacgcgctttttatttcgctcagcgcataagcaggtaataacgcaaatattgaaggtttttcaatttcatctttgtcacgctttaccgtctcggtctcttctccatactgacgcttcagttgcgcgttttcaaaaaactgaactaactcgcgatctgaatatttgatcagataatcgcgataaccatccagaccttcatcaacgtgtttacttaatgatgaaatatcattaaaggtgacatcttcgtcctcaaaatagacgtaggcatcatgcattatgggccacataacaaacatagaaagcagcaatgcgacgccgttaagcgtcatatttgaaggtatctgctgtaatcccagggcgttacgcaccatgacaaatacaatagaaaatttaacgaaacaggttcctgacgcaataataaatggcaacagggtggaaaatgccagtaaggcaattaatgagatatcattccccattaccagactcgctcagccattcatggatctcaacgcctaaggtgtcattcatctgtaccagttcgccattacccagcaaaacaccattcgccataatttcaacgttaagttcagcattggtcggcagtgataatagctgttgctgccccatggcttcgagttcggcgagggtaacgttcttacgatacaaaacaaattccagtttgacgggcaattgattcaagccaggcagagtttctgcagtttcagttgtattattttcttcttcgatatgttgaatatctaacgtttccacaataattcccccttcaacacggttgaaatgacctaactttttcgcgtagcaataaacttccgcacgggaagtacgaatcaggagtacatctccgatcccgattcggcccagcaacgaacgctgcgtatcactgctaccgattacaaagcgcaacggccaacgcagcattttcggcctgccgcccccgactgcaggcagttcaggaagatgctcaaaccacaggccgccccgatcgctcataatgtgcaacaatttcccttccggcagcgcgcttcccggtacggggttctctacgcataaacgccgacaggacaaatgcggcacgggcaactcaaacggtcgctctgttgcagcaagccagggaacgaccaggtgctcagcgccagcagaaaccgccgccccagccagagcgggagagacatgctcaagccagtccccaggtttaatccaggccgaccaccgtttttctgcatcgctcaaccgaacccacattccctgtcgcgtcggatattccagcgtcgcttcccggccatggcgctggcattctgtcgcggtttgcgccaatagccattcgcgacgatcaatctgtctcacacgcaatgacatcaggcgtcatcctcctcgccagattgctgtctgtgctgttgctgctgcggattttgttgatcgtctcgcgtcaggtgccagcgctggggattaccgttttgccattgatcatgcaaacgatgttcaacctgcgtatttgacggtattaacgaaaactcccctgcttgccgcgcctgaatattgacggaatagtcatttccccagcgctgaaaacggtaagtcagcgagctatcctctcctttcacgccatcggcagtgggaaaaatagtcatcatcggctttgattgcgccgctaaaggcattttttcatcgccgccggttaattggctaagatcggcgatagtggttggttgcagcggaagctgagaaacatctttaacctttttatgatctttatcttcaggcttaccggtattggctgcggccattcgggcaggtgcgacatcccgcgccagcggcgcgccctctttacgaacgccttcgcccgcgatggctttattatccccaggcaatgccttgatattatcgtcagagattcccgtggcgttatcggttacttcactaacggattccacagcttttaaatcagcagataattttttaccgcttacgctttctaacggcctatttttagacgatagcaacgctgcggatttatctactttggcctccgcagagatcaaaccgacagatttttcagcagtgactttcaacagtttttcagcaatcctgagttcgctttttccgttatgatgcagaccagaaacgttgccattgtgatgttctgatttcgctggcgcgccatgtcgccatgccgccagtaataacggtaaagccgtttctttatgcattacgaaagcatcgccatagtcgcgatcttttttatcaccggaatattctgtcttatgtttttccaccgctttttttaatgcttctgataaaccgccaacctcatcctgctgcggcagtaaaatgttcccggatgaactgacagctgacacatcgcccattaaattatctcctctgactcggcctcttcctgctgtatctctcgctggatatagaatcttttctgacggattatccagcgttgatagttcccttctttgcgcaaccaatatttactttttttctgaaactcttcccttttcttttccagctcgctccgtttttcctgaatttgtataatctggagttctaaatcttttatctgccggcgaacaatagactgcttacgtaataacgtataaatttcctcacgactgagctgtctgttttctgcacgcagcgtatctaataacaatttcagacccgctatttgttcaaggatcgcctcctcctcggcctgcagcccgcggtcctcatcctgatagcgaagtaatatcgactcacactgtgaatgaaataccgtacagcgccgctgcaatactttaattctggtcagcgaatgcattcataccgctcaacgtgtcatcaaaggatgaatactgcgctaccggctggcataaccaggctttcaggctatcccgcatctgcatcgcccgatcgttatcgatattttcgccaggacgatattctcccaagtcaatgaaaagctggagctcttccaaacgcgtcattaatttacgcacggcagatgcctgttcagcatgtgtcggcgtcgtgacttgtccaaaaacgcggcttacgcttttcagtacatcgattgccgggtaatgtccctgcccggccagctttctgctcagatacaggtgaccgtcaaggatagagcgaatttcatccgccatcgggtccgcctcttcctcgctttccagcagtaccgtataaaaggcagtaatgcttccctcgctggtcgcccctgggcgttccagcaagcggggcaaattatcgaatacggaggcgggataacctcgacgagccggacgctctcccgacgccagtgccacgtctcgcaaagcacgcgcataacgggtcatggaatcgataaaaagcacgacccgttttccctggtcgcgaaaatattccgctacggttgtcgccagttgcgccgcattgcagcgatcgaccgaggggaaatcggaagtggcaaaaaccagcacgcatttttctttcttatgcgaagcgcgcaacatatccacgaattcagtgacctcacggcctcgttcaccgataagaccgataacaaagacatccgcctccgtttgctcgatcagcatatgcatcagcatggtcttaccgcatcctgcggaggcaaaaatgcccattcgctggcctacgccacaggtcaataacccgtcaatcgcgcgcacaccggtaatcagcggttcacggacgccaacgcgtgaagcgtaagacggcggtgcgacatcaataacgcgttcttcgctaatcggcgccacttcaggggtaaaacgctcaacgattttccctgtcggatccaacaccgcgcctaataccgagtatcccacccacgccgataacgcacgtccagtgggataaagcacgacatcgcggctcagcccctgggcattgccgataaggctcagcacggtgcgttcccgctgtaagccaaccacctgcgcacgtgcaacaacctgtttttggtgccagccacggcgtatttcacacagttcgccaatggccacatcgcgcaattccgcctcaataattgggccggttattttttgtgggtaggccagatattgcagtaaacgaggtgttttcatctcattagcgaccgactaaaaacttccagatagttgtaaaacccattcaaggcagtagagaacttttcaccgtcagataaaaaatccggatgcactaaggctttaagcgttagctccccattctgctcccccagtagtaattgcccgccgcgggcaaaatggcatccttccattatggtcattaagatttcataagcccgctgttgtaataccaccatgctgtcagcacccaattgcgcccagatccatacatcatcgtccttgacgctgatacagatacttggcaatgcaaataaatccagaacaattgttgaatggctatctattcctccaattaatgaaggatcgcaaccacttacttccagtgcggaacgaactaattcagcgatatccaaatgttgcatagatcttttccttaattaagcccttatattgtttttataacattcactgacttgctatctgctatctcaccgaaagataaaacctccagatccggaaaacgaccttcaatcattttcttaataaatcgacggacatcgacagacgtaaggaggacaagatctttatgtgcaatcaataaatcatccaacttaagtgtaatgagatccatcaaattagcggaggcttccgggtcaaggctgaggaaggtactgccagaggtctgacggatccctttgcgaataacatcctcaacttcagcagataccattactgctcgtaattcgccgccattggcgaatttatgacaaatataacgcgccattgctccacgaatatgctccacaaggttaatgacatctttttctcttggcgcccacaatgcgagcgcttccataattaacttcatattacgcacggaaacacgttcgcttaacaaacgctgcaaaacttcagatatacgttgtaccgtggcatgtctgagcacttctttaagtaaatcaggaaatttcgcttccagttggtccagcatatgttttgtttcctgaataccgaaatattcattgacgttgcgcgccagcgtcaccgccagacagtggtaaagctcatcaagcgcgttccgcaacacatagccaagctcccggagtttctccccctcttcatgcgttacccagaaatactgactgctaccttgctgatggattgttggattaataccaaaggacacgacttcatcggaataatttaccactcgcatcaaatcaaaatagaccgtaaattgttcaacacggatctcattaatcaacaatacgatgctgttatcgtccaggccctcgccatcgcgtaacaatacttccggcaggcgcacgccataatcaataaagaactgactacgtagacgctccgcaagttgagctttttccagatcttcacgccggctcttcggcacaagtaatatcaacggtacggtctctgtagagactttatcgagatcgccaatcagtcctaacgacgacccttctttttcctcaatactgagcggctgctcgcctttgctggttttaggtttggcggcgctacgttttgcttcacggaatttaaaatagaagagtacgcttaaaaccaccgataaaataacaaaaaccggcagtgggaatcccggcagagttcccattgaaatggtcaaaatagccgtaacaaccaatacaaatgggttgttcaacagctgcgtcatgatattccgccccatattatcgctatcgccatttacgcgggtcacgataaaaccggcactaatcgcaatcaacaatgcggggatctgggcgacaagaccatcaccaatggtcagcatggtataagtagacagggcggaggacaaatccataccatggcgagtcatccccaccgaaataccgccaataaagttcacaaagataataatgatgccggcaatagcgtcacctttgataaacttcatcgcaccgtcaaaggaaccgtaaagctggctttccctttccagtacgcttcgccgttcgcgcgcggcatccgcatcaataataccggccttcaaatcggcatcaatactcatctgtttaccgggcataccatccagagaaaatcgggccgcgacttccgcgacacgttctgaacctttggtaataacgataaactggaccacggtgacaatagagaagacaacaaaacccaccgccaggctatcgccaataacgaattgcccgaacgtggcgataatttcaccggcatcggcttcaatcaagataagacgactggtactgatcgataatgccagacgaaagagcgtggtaattaacagtaccgcaggaaacgttgaaaaactgaggattctgtcaatgtagaacgaccccataaacaccaatatcgccagtacgatattcagtgcgatcaggaaatcaaccagataggtaggtaatggaatgacgaacatagaaatgatcatcaccattagtaccagaatcagtaattcaggtcgtaaacgagcactgttaagtagagaaagcagcactataggtatcctgttaatattaaattaagacagcttttcaatagtacgacgctgttctgccatttcatgcttgtaggcaatatcggtcatactacgtaacgccattaacaattcttcctgccaatattcttcataaaagagtgaagagggtatggctttacatacttgataaaatatctgcaaaaaggatgcatgttctttatgactaagcaataacgcattcaaacctataatatcggctaacagcgaatccacttcatgtggctgttgcaatagcgaaagcatcagtagtaaccacgacgactcctccgcattaaacgctttggtaaacgaatacgacaacaatgtactcacaaacagtaggtcagcggagcgcaacattttaagttgcgtcaggcgtcgtaaaagctggccaaactccaggcgcgaacagctggcgtcattcgcgtcaatatcggttaatagcgaaccctcaataaaatccagtaccaccagtcgacgttgatagccataactggctatccagtcagagtaaatctccacttcatgtgattcactctggataaattgccgatagctggcgcgcaataagcctggttttaacgataatgttttcccaaaaagccgggccttcaacgcacaattaatccctgccttgagggtcttcggatcggtttgctcttcaacgtgcttaagtaacgactccagctttttccgcacgatctcttccaggtctttacgacgaagcaattcgcgtaacacaaggactaaatcactggggtcaggaaataagctacgcgcctgacgtaaaaaatcttctaacgcgccgccatgtacgctaattagctttaagatttgcttcgccttcggtaaagcctcatcctccagcacgcgttcaaaactgttagataaattactggattttttttcataatcgcgacggttacgaaattgcgccagcgccgctgacatttcgtccgtcgactggacaaatttttgtacttccgcccctggagacgaatcctctgcggcctgttgtatttccgcctgttgcgcatcagtatgctgggtcgcatcctgatgagatgtctgccgggacaatattctggaaaatgaaataccggaggttgagccaggaatcatttaattgcctcctgacctctatccagataaacacgaacccatttctgtaacttatcgtccccactccaggcaccgctttgcttcagaatattgtttaccgattcgctggcatccggcgttaacgggtcgacaatttcttttggttcaatcatgaacacacgaacaacattacttttattcttactggaataacggaacaggctaccaataagcggtaatttgcctaaaaacggaatactttggacagtatcggtatttgcatcccgtgtataacccccgaccagcaaactttttccgtgcggcactctcgcaatagtgctaattaacgttcgcccgacttcgggtaacgcatctacggaggtggtagtatcagattgcggcgtcttatcgttgccatcttcaatgtccagcgacatttctatctgaccatctgcggaaaaacggggcagcactcggatcattgttccgtatgttacatgctcaagcgccacattacgttccccaatcagcttggtgtaaaacgttctgttgttatcaaaaatagcgggaacattttcctgagtcagtaataccgggcgcgaaaccaccgtcgcctgtttcttctcttctaacgcattgaccgcggcgatgaatcgactgccatcgagggtacttattgaagactggtttaatgacacgccaagtttgtccccaatagttatgctgccgctccatgaagtgcccaaacgctccagatcgcttttattaagatcgacaatccacagggataattctacgtgacgtttggcgacatccagcgctttaaccagcatttcgataaaatgcacctgctcagccgttccctttactaacaaactgttggtatccggataggccacgattttaatattgcccgccgcggcattttgctttaaagcttcctgcagactcatgccaccggcataatttgctgctttacctttttctccattcgctgaaaacgctggcatcgccgggggttcgctactgacaatattacctaagggttgctcttctccctgcaataacctttcaatggccgtagcaataccgggaataaccattttctgatcgcgcagattataggtacgatcgcccacgaaggtattgttcagacgcatcacccctattttctggcgtcccagctcaataccatcgttttgcttgtccatcatggtggcggcgttgaccaccatatcaacatagacgggtggccctgaaacatagaatgttcctttacggttatcgccacgtagcgggtaatttttgttatataaacctgagcgttttagaaaattgttgaactcattgagtgagacgttgcgtaaagaaaccacggcattgcgcatttcactggcgtcataaatatagatagcctgcccatcgaaataccaaatcagccccagttgtagggaaagcttctccagtaatgcgttaggatcgtgaaactcaaagttgcccgtaattttttttcgtgccgccattttgctaacaatgacaggctcctttagctgtagcgccatggcatcgaaaaatgtccgcaggctatcgtctttcgcaacaaacccacttcccgttacaggtattttttcactagaataaccaggtgtaaccagaacaagcgcggcacatgccagcactctggccaaaagaatatgtgtcttcatttgtctgccaattgaataatatttgataatttccgcggcgaaacgccgatcagctctttgatctcactagaaaaatgtgaaggcgatgagtaaccatgattaacggctaattgggtgatgttctcgtggccttctacactattcagcagcgattgcgccatacgccagtttcgtaattcactcttcgcttttccgcccaacgctctgctgcacaaacgacgaaaatgggtataagaaacgccatagtcttctcccagcattctcatcgtgttgccgctggttgactgagcgagtaaatagccaaccaaccagtaactctcgctttttcgtaacagcgccagtaccttattgaaggccggagaaggcgtaataatttgctgcaaaaaccagtactcgcagcgtttacgatcttgccaaatagcgcgaaactcaggactcagcaaaacccatttatcggattcagcatatgtcgtgtccactaatcctgcgccatcgataaatgccagtaatttgctgagtacttcaatttttaacggtcgaaaaaccaggtctcctgatactggtgcgacaacggcctgctcgcaaaaaagcagcgcgccttcctgaatcaggcaattttcattgtgtcggctttcagaaaatgacatatgcagcttttgcgcggaacacgtctgtataaaccatgcttccgggctgcggattttccgcttctctccttctttaagtacttcctgcgtatttagcatagttgtcagcaccagttaaaaatcattttaatatgtaaacaataccgggagcgggtggcaaaatcctgatgcaatcattatgaaactgatgccgcccgctaattaaattggccaacttgcatagtgtttgctgatttaaaatagaaaattagctcatagtgtataaattctggcttattgttctgcagcagcaaaaattcagatattgtcatctggatggagaattaattatttatatcaggagttttttttgctagcattcctgaaacgcattcgcccccttataactattgtcagataacgttctgacggttgtgtaaaaacatggcgcctcattcttctgtagttggagttaatatgaaaaaattttatagctgtcttcctgtctttttactgatcggctgtgctcaggtgcccctcccttcctccgtgagcaaaccggtacagcaacctggcgctcagaaagagcaactggccaacgcaaatagtattgatgagtgtcagtctcttccgtatgtgccgtcagaccttgcgaagaataaatcattatcaaaccataacgctgataattccgcatcaaaaaatagcgcaatcagctcaagcattttttgcgaaaaatataaacaaaccaaagaacaggcgctcaccttcttccaggaacatccacaatacatgcgttcgaaagaagatgaagagcaactcatgaccgaatttaaaaaagttttgcttgaacccggaagtaagaatttaagcatatatcagacgttacttgctgcccatgaaagactgcaagccttataaggccatatcaccgttggctgaactcatcatgatataattaagaccatattttgcattgccacttaatatcaatataattattatagctatggtcacttttacggttggccatttgtctcttacgttgcatttatcaatctgctttttgatacagcagcacctcgctgctgctttttttatttgtgataaagaacggcctcccagacttgggaaatagccgaaacttatactgacaaactatcgtctcgtatatcgcgataaactgacatccccctcctgccccacatgttggcattcttacgataccccatccacttttcgcggataacgctctttttacccgtgacagcgtattgacgaccaggctagtatagcggcagaaacgtcccgatgcctggaatgaatggcaaacagtctataaggtgattgaatggatacgacagaagaactaaacggaacctacttctaccacggacaatcgaacctgtcagcaggtgaactatttgatgtaattttcattgagcaattttgtgatgaacttgggattggcattgagtcaggtgctgctatcctcgccgggcaaccgtggttaaaaaccagaacgaaaccgggagaggcaatcaaagggacaagtgttatctccaggtatgggagaatgcttttacgaaatgcacgaactccttttggtattagagttcctacacccgttggtataagaatgcgaaaaacaaataatcttgccgcagtcatagcacgatatgttccatggttaggttgggttggtcttgtgaattcaatttaccaggtatcaaggagaactcaggcaaaatacaacctaatagcacgccctaaagatcgtatacaatggacatccttttgatggacacaattcagcaagaggtgttagcactcttccgtgaagagattcccggatatttagacagcaattggaaagaaatcccattagaacttgattctgatttatttgaagctccaggcgatgacctgcatgaagctttggataaatttgaaaaaaaatttaatgtagatttatcacaagttaaatggtcgtgttatttcccttgggagaatactccactgcttacacgatggtttaaattaaaacgggaagatgtagaacgaactcgtaagcctttaacaatcagaatgttttctgaatcagcgaaagctgggaaatggctttatgattaatgaaaaatatgtcgaattaatcaggagctaattactatgaattttgttaatcgattaaaattaaaagtagtaaatttcatatacttttcaaattaaaataatgtgttgtatctacctttcgaccaccagtaactctgacgccatccgttttaaattgaccatttggttctggtggtatatcgcaagtagatatttctgaagtgcttgactattcactcttttttagcctgcatgtatggtggcgacgatgctgttacataggtaccggtatattaccaaattgattctgccagatatcccgcctcacgtagagcattcataattttattcgctaattcatactgatattcatacgaggtattctccatggaaaataccgttaattcatatttataatacagccaaccatcattctcatttatcaacttaggattacagtcataatttctttctattgtaatcattgtattttcgtatcttaaatataataagttcacttttattatgtctggaatcccttgggataaaaaatcaattaactcatatttatccagatcagactcaacaacgattgtgaattcagagttaacttcttccattatggaacctcaatatatgggcctctattaaacggtgatgattgtttcattaccgatacctgtatttttgttacatcatccggatgaaagtgtaggatatacatcctcccatatgccaccttcatcaccagggcctaatgcacgccgttgagcctttgttgatttttaaccttctgatcttactcagcaatagtggacacgcaactaagtgagtaaacgctcaagcaagaggtgactcacatgacaaaaccagcatcaaccaccaataagccacgcaagcagcacacgcctgaaagccctgaaactggcggaacgcattggggtggccgctgccaccagcgagcttaacctgtataaatcacagatctacagctggcgaaactcagctctcttcttctgaacgtgagcaggagatgtccgccgcttagggttgtgtccctattacgcgggtaggatcaatcaagcagttacggcaaaaaagagaatcatggatatatttagcaaactccctgatgatacgtaatcagtgagattaaaataatgcaatcgcgataaaccgaagttaatcccctgtttaaagacagtgagcgaccttcttgccatgcctggactatatcagcctcatatgtacgccttgaaagcgtacagatatgtattataattgtacatattgttcataaacaggaggatgaaaaccatgcctcagatagctatagaatctaacgaaaggctgtcgttacgtgtatcgacggatgccaaaaagttgatagtccgcgctgcggcaatccagcaaaccaacctgacggattttgtggtcagtaacatactacctgtcgcacagaagattgttgatgccgccgaacgggtatatctgacggagcgcgatactaaaatgatcatggaaattttagataacccgccagcgccgaatgaaaagcttcttgccgctgctttcgccctgccggacatgaagaaatgatgtttacagactggcatgaggccgcgatagggaaaacccacaatcgaatgaattttgattgtggggatgccgatctgaaccaattcctgcaacgccatgcacgacaaaatcatgagaaagggacaacgaaaacctatgttgcgcttgataattcggatgttacacgtatccacggcttttactcagtcagtcctgcatcactgatatatgcacaggttcccggcgcaatcagcaaaggattagggagatacgatgtgccggtgtttcgtctgggtcgtttagccgtagacaaatctatgcaggggcaagggctgggagcacaacttttgttatctgccggaaagcgttgcatacaggcggctttgcaggtcggtggcgtagccctacttattgatgccaaaaataaacaggtctgcgactggtacaaaggatttggcgcagtaccattaaacgatcaacccctttccttgttgctgtcgtttaaaacgctttatgctgctttatctgcatctggtaggttatgacaacatgaggctttgttgaataattcagaatcggccaacgataaggatacaggactcccaccggagcactcgttatacgagcctgacgctggtcggcattgccaacaacgtcatccggttcagcgctttgaccatcgccatcgcttcacccacctgcgcgtcatagttccgcaggctcagatggccgcccagcaaggttttgatacggaacatcgctgtttccactactgaacgacggtgatagcccactttcttttccagacctcattgctgccgctccgatgttgattttaaacttttgctttgccatcggaacccgatgctgaaacgacagtaacgattagatccgccaatctctttattcaacaaagccccttcgggatagagcttccgctgagcgggaaagtatgcctttgcaattaatcaataaagtgttgcgcgagaaatcgtgcatctttcaagcacatcgtctactttaattaaccgattcataaaatatatattatctgttcatttctagcctgtaggatattttaataactgtatattttaaacaataaaaattaatattggcctacttttttgttataataccagactccaaaattgtgctataggaacatcatggaattaattcgttatgctgacatcaacagcgatctctatcgccacatttgggtcgttggtgatattcatggatgttactccttattgttaaccagactggctcaattaaatttctctcctgataccgatctcttgatctccactggagataacattgatcgaggaaaagaaaaccttgaaacactgagactgttaaataccccatggtttatttctgtagtgggtaatcatgaagctatggcgcttgacgcttttgaaacacaggatggcaatttctggtatgtaaacggtggttactggtacgactcggtcaccgaaaaagacaggcaagaagccactgagctattactaacttttaagcagcgtcctcacatcatagaagttgaaacgtcctcaaagaagtacgtgattgcccatgccgattatccagatgacagctacgattatgggaagcaagttgatattgatagcgttctatggtcacgcgatcgtctgcttggttcgttacaggggaatatccatccaatacgcggtgcggatacttttatcttcggccatatgattgttgactacacaacaacattcgccaatcaaatctacattgacaccggttctttctgttcaggcaatctgtctttttttaaaataaagtaatctggaaatagaattatataatatcaaccctccctgcattatgggcaatgatatagccttcaataagtaccattgcccattcgtaatagcgtctaaatttcgcgtttttctgcccatttcagcattaagatcgcaggccaaaaaaacgaagccgtaatccgacgcaggtagttactcgatcgcctgagaagagtaaagatcgcacagctccagatacctatcggaagaaaacgcaataaccgtggtggcgaaatggatcggcttgccttcatgcaacacaatcttgattacagtctcgagttcggaagcatccgtttccctcttaattttgttgaaatttctctttgttgcgagcatggtctgaactaattgcctggcagcttgccttgtttcgtcaatatttggaaaatcgaacacatttccaacttttactttcaagacagaacttggcttcctaccctcactgacattacgatctgacgaggctactcttcgctggattacgtaggtttttttcgtcaaactggcttttaccccgaaaccagcaggagcttctctgtggtcatcgaaaacagtgtagagtttttgagctgggttagcttcgaaaacgatttttccagagcgactgagtgcaggcttaacattgatacttaacttgttgataatgaaaggctggctgagagttgttttcaaagtatcacccctgttgtagtccaggaatgatgagaatgtaacctgtcacattttaggctacaggtgagctacaaatttatgggtttatgtgagtttataagggttttacctggggccacatgagcacttgaaagaataaaaaaacgagtaaaatcaatatgaatgagtcatttgataaggacttctccaaccacaccccgatgatgcagcagtatctcaagctgaaagcccagcatccggagatcctgctcttttatcgtatgggagacttttacgagctgttttatgacgacgcaaagcgtgcgtcgcagttgctcgatatttcgctgaccaaacgcggcgcatcggctggcgaacctatccctatggcgggtatcccgcaccacgccgtagaaaactacctcgcgaaactggtcaatcagggcgaatccgtcgctatttgcgaacagattggcgatccggccaccagcaaaggtcccgttgaacgtaaggtcgtgcgtatcgttacgcctggcactatcagcgatgaagccctgttacaggagcgtcaggataacctgctggcggctatctggcaggatggtaaaggttacggttacgccacgctggatatcagctccgggcgctttcgtctgagcgaacccgccgaccgtgaaacgatggccgcagagctgcagcgcaccaatcccgccgaactgttgtatgccgaagattttgctgaaatggcgttaatagagggacgccggggtctgcgccgtcgcccgttgtgggagtttgagattgataccgcccgccagcagttaaatctgcagttcggtacgcgggatctggtcggtttcggcgtcgaaaatgcctcgcgtggattatgtgcggcaggctgcctgttacagtacgtaaaagatacccagcgcacctccctgccgcatattcgttccattacgatggaacgccagcaggacagcatcattatggatgccgcgacccgccgcaatctggaaattacccagaacctggccggtggtgtcgaaaataccctcgccgcggtgcttgactgtaccgtgacgccaatgggtagccgaatgcttaaacgctggctgcatatgccggtacgaaataccgacatattacgtgaacgccagcagaccatcggcgccttgcaggacaccgtcagcgaactgcaaccggtgctgcgtcaggtcggcgatttggagcgtatccttgcgcgtctggcgctgcgcaccgcgcgtccgcgcgatctcgcccgaatgcgtcacgccttccagcagctgccggaattgcacgctcagcttgaaaccgttgacagcgcgccggtacaggcgttgcgtaaaaaaatgggcgatttcgccgagctgcgcgacctcctggaacgcgccattattgacgcgccgccggtactggtccgcgacggcggcgttattgcgcccggctaccatgaagagctggacgaatggcgcgcgctggcggacggcgccaccgattatctcgatcgtctggaaattcgcgagcgcgagcgtaccgggctggatacgctgaaagtcggctataacgcggtacatggttattacattcagattagccgtggtcaaagccatctggcgcccatcaattatgtgcgtcgccagacgctgaaaaatgccgaacgctacattattcctgagcttaaagagtacgaagataaagttctgacctcgaaaggcaaagcgctggcgctggaaaaacagctatatgacgaattgtttgatctgctgttgccgcatctggccgatttacagcagagcgccaacgcgctggcggagctggatgtgctggttaacctggccgaacgcgcctggacgctgaattacacctgcccgacatttaccgataaacccggtatccgtattaccgaaggtcgccacccggtggttgaacaggtactgaatgagccgtttatcgctaacccgctcaatttatcgccgcagcgccggatgttgatcattaccggccccaatatgggcggtaaaagtacctatatgcgacaaacggcattgattgccctgctggcctatatcggcagttacgttccggcgcaaaacgtggaaatcggccccatcgaccgtatttttacccgcgtcggcgcagcggacgacctggcctccgggcgttcgacctttatggtggagatgaccgaaaccgcgaacattctgcataatgccacggaaaacagtctggtattgatggatgaaatcgggcgcggtacctccacgtatgacgggctgtcgttggcctgggcctgcgcggagaatctcgcgaataagattaaagcgttaacgctgttcgctacccactacttcgagctgacccaattaccggagaaaatggaaggcgtggcgaacgtccacctggatgcgctggaacacggcgatactatcgcgtttatgcacagcgtgcaggacggcgcggcaagtaagagctatggcctggcggtcgcggcgcttgcgggcgtccctaaagaagtcatcaaacgcgcgcgccagaaactccgcgagctggaaagcatctcgcccaatgcggcggcaacgcaggtggacggcacgcaaatgtcgttgcttgccgccccggaggagacatcgcctgccgttgaagcgctggagaatctcgatccggactccctgacgccacgccaggcgctggagtggatctatcggctgaaaagtctggtgtaaacgtgtcagacccgatagcgccgcgctatcgggtctgcgcgccggaacaggcttttcaggctgtgactgtcgtttcgtgtaaatgacgccagactatccgtcctctttccctttttaaaatgaccgtcgaccagcgtaccgtctcggcctggcccggcagttgctgtcgctcacgataacgcagcgcggcgccttccggccactccgccacaaggtcaatgtgctcaaccacgataaccagacccgggcgacacgcgcgctgcgcctggaaaaaagcgcccagcgccggataatccagacaaacaccgcctggcgttatcatcgtaaaatcagcagcgaaacgcgctatcaacgcctccaggctacccacccccttactaagccagttctcaatcgccgcatgggcatgaataatttcttctttatatggattcatgatctttcctttttcaggcacagaagcgcctgtctattgtttagacagacagcgtaaataaggggcagcagggtgataccggcggcggcaataaaggtccagcgataagcaacctcaagcgacataacgcgctggagcgcatttaacagcagcgtcaacagcgtcgcgccaaggaaaaagctgatctgacgattaagattccatagcgcgctggcgtcaggcatgtcccggcgagcaatagtcaggaaagcgccactctgcgcggtactgctgcacaaactgccgccagcgcccattaaggcgaatatcatcatcagtacacggtgcgatgtcgcaggcgtaacgttagttaaaagcagtatccctgcggcctgaagaagacagccgacgataatcagcggacgcggcccaagccgattgaagtaacgtccggtaagcataatggcgacaaatgaagcgatcgaccaggggatcatcagcgaccccgccgccgcaggcgatagctgcgcgacgttctgtagataaaacatcccgaccacgctgataccaatgaacatacccggcacacacagatagacgatcatggcaaaacgcagcagcctgtccgtcaacaacggcagatggagcaatcttgctgacgccattgtcgtcgacgcgacattcagccaacgataagcgagcaataaggtgagaacggccaccggcagcgtggcaaagaatatccagcgccagccgcacgtttccaccagcagcccgccaatcgcaggcgaacatgccggcgccagtagcgccaccatcatgacaaccgatgacacgccagcgcgttcatgcggtttaaactgttgccaggttaacgcctgaccaaccgggatcaataagccaccgcccgccccctgcacaatacgccagaaaacaaggctgtgtaatgaatcggcaaaacctgcggcagcggcggcaacgctaaacagaatgagcgaaaatatgatcagccgtcgtgcgccgagataacgcgaaagaaacgcgctaaacggaacgatcagcgttaatcctgcgatataaccgttactcacccatgccagcgccgatatggacgtatgcagatccacggacatcgcaggaaaagccacgctggcaataaacagattaatcagatcaagaaagaagccgagcaggtaaaccactgccactttactgcgatacgtcattatgcatcctccgtcagaggcgctaatgtagccgtccggagaaagccagataagtccgcgcttcaacgatatactgtcaaaataattttgacagtaaaggagctcgccatgctcaatttgcagcgtatgtcgctgtttatcgccgtggtagatagcggcagcttcacggccgccgccgccgcatcgggccaaacaaaagcggtagtgagttttaatattcggcagcttgaaaaagagcttggcgtaacgttactgctacgttccacccgacgattgacgctcacagacgccggcgtcctcttttaccaaaaaggcgtgaatttactcaacgcagcgaaaaatttgcaggatgaagtgcgtgccagccatagtgggctgggcggcgagttacgtattaccactacgcccgagtttggcgaacaggtgatcattccgttactggcgcagtttagtcagcgccatcccgatctccgtattcggcatatgtcctcatcacatcatgccgatttaattgccgagcgctttgatgtggcgattcggcttggctcgctggccgactcccgctatcgcgccgcgctgatatcccgctttaccattctgccggtcgccgcgccgcagtggctcgcccgcaaccccgtgtcgtcgctggagtcgttggctcaggcggaatggattattcatgagcgattacctacgccgctacggtggacagtaacgagtaatcatggccaacactcacgcctggagataagcaaagccggcaaaatttctgtcgacagcgcgcgctcgctgatggccttcgctctcgcgggaagcggcgtcgcattactgccgcaatggttagtcaacaccgcactggaggatggaacgttaattcacgtgttacccgactatcattttccccgtcagggcatttatgccgtttacccggacgcccgccatgtatcgacaaaagtacgcgcatttattgattttttacgttcgcaatgggattgcggggagcacgccccatcatcgtagccagtccgggagcattgcgctcccggacggataatactgtcttaatccttaactaccagcttgtctttgatcccctgcgcctgccaacgcacccacagcataattgccgccagaacaacaatcggcagtaacggatcgagccaactaccgccggaaccgaacagcaggttaatcagcaccacgccggtgccgccaatcgcccaggcaatggtcgtcggtacagaccaaaccaccatctgctgtttgacatcagagacacccatcatgcggttaaccacccagaacaggctatcgttgaagtagccgaagaacagcgaccccatcgttgcggcctgagcggcaagcaacatattgatgccggggatctgcgccaggatcggcgcggaaatcgaggcggcagtgatcatcgccaccgtccccgatccctgaatcaggcgtaccaacgtcgccacgataaacgggatcaggatcggcgagatcggcaggttggcaacctgctccgccagctgttgccccgcgccgctgtcgcgcaggatcgcgcccaacgcgccgccagcgcccgtgaccagtaagataatcccggcgctttgcaagccctcttccagacgctctgcggtggtatgtttatccatgcgcggcaccagcgtatacaccgccagcagaacgctgatggccaacgcgatcaccggacttcccacaaagttgattgcctgtaccaccggatgcgtcgccaggccggaccatccttctacagtggcgagggtggaacagatagccttcaggaagatcagcacgatcggcaccacaataggcagcagagaaagcgtcaggctcggcagttccttttgctctttctctttattgtactgctccagcgcggcattgacttcatcggcgttcagcgtgcgcggcacgaaatcagggtagcgtttatccagccactgcgcatagaacacaatgccgatcacacagggcaccgccagcgccatcccggtcaataacattgcgccgatgtcgacgttaaaaatcccggctacccccagcggaccgggcgtcggaggtaccgtatggtgagtgaccaccagcccgcccgccagcgcgacgcccagcgtcagtagcgaacgcttaccgcttttcgccagcgctttcgccaccggataaagaatgacaaaagcggaatcgacgaaaatggggatgctgacaatataacccgtgatcgccagcgcccactcttcacggcgtttccccagccatttgataaagctccaggcgatacgctccgccgcgccggaaacctccagcaagcgccccatcattacgccgagaccaatcaccaggccaatgctgcccagcgtcgtaccgaatccgctggtgatgacagagagcgttttatcaatgcccattccccccaacagaccggcaatacaggccgccgccagcatcgcgatcagcgcatgaacacgggtgcgtaacaccagccataccagcacgaaaacggcaacgatcagaccgataattggggtcggtaaacttgtcatgacctcccctccatatcatcttgtcgaaagcgttcgataatgtcatcgaagcgtttatcggcgacaaaacctaacgccagcgcacgctggttatcgatacgtcccggccaggaggcaacaattttctcgacgccttcgtcgcgctgatgcgtaacccgatcgcgcgccgcctggccgcccgcctgacacaacgtttccagcatctcgcccacggttacgctgatcccgggtaagttgatgctgctcgcctcgccaggcgcgggtaacgttgcggccagcgacaggttatggatcaccgtcgccgggctggaaatccacagccgcaaactttccgacaccgggcagacggtcgtctcgccctgcaacggttcacgaataatcgcgctgacaaaagaagaagcggcgcggtttggtttacccgggcgaacacagatcgtcggcaaacgcagcgccagcccatccacatagcctttgcgggtatagtcgttgaccaacagttcacaggcggccttctgcgcgccataagacgagcgcggcgtgagcgcggtggtatcggtgacgcattccggcagcgtaccgccataaacggcaagcgagctggagaagacaaaacgaattttctgcggttgtcgacgacacgcctcaagtaactggcgggtaagatccaggttaactttccatcccagatcgaaatcgtcttccgcatgactgctgacaatcgcagcgagatgataaacaacagaggtattagcggtaatcacactctccagcacgcccggctgggttaagtcagcctccaggcagcgtaaacgaggggaatctgataaccgtgcaggcatttttaaatcaacaagaagcagttcgttaaacgccagcgatgagtttaataaggcgcttgcgagtttctggcctaaaaagccgcccccgccggtaatgataatctgcatccggatgtcctctttattgctgtgtagggtagttcagggttagcgccaggcgttaaaccagccaagcccgtcctgagtggtattccgtggttggtattcgcagcctatccagccgcgataacctacgtcatcgaacagccggaacagccatgggtagttgatctcgccatcatccggttcatgtctgtccggtagcgaggcgatttgtacatgggcatagcggcccgcatactcgcgaatcaggtgactcaaattgccatccactttttgcgcgtggaaagtgtcgagctggatgaacacattcgggcggtcaacctcttctgcgatgcccagcgcctgatattggctggaaaagaggtagccgggtttaacgccgggactcagcgcttcgatcaaaatacgtttatcgtgggcggcaaaccggtcggcggcataacgcaaattatcgataaacgtggcgcgataacgtgcgccatcagcgccatccggcacgacgcccgccatgatgtgaacctgctcgcattccagcgccagagcgtattccagagccagatcgatatcggcgcgcgcgtcgtgttcgcgccccggtagcgcggcacgtccccattcgcccgccgcggtatcgcccgccgaagtattaaacagcgccagcgtcagattatgacgcgatagctgggctttaatctcgctggcggcaaagtcataggggaacagaaactcaacggcctgaaaaccggcttcagcagcggcggcaaaacgctcgataaacggcgcttcggtaaacatcatcgacaaattggcggcaaaacgcggcatcgggttatctccttaactgcgcaatttcttcggtggttaaataacgaatcgggcgttcgccaaggataaaaatcagctttgccgtctcttccagctcctcggtattattagcggcttcctgcaaattctccccgcacacgaccggcccatgattagccagtaaaaaggcctgatgccgggccgccagcgcagccaaatcgcgggcaattcggtcatcccccgggcgatagtagggaaccagcggaatgtcgcccatccgcatcaccacatagggggtaaacgggcgaatcacattttgcgggtccagcccttcgagacaggaaagcgccgttgaccaggtgctgtgcagatgtaccacggccttgcagcaagggttattgcgatacaacgccagatgaaaacgcacctctttagacggtttatcgccgctgagccattcgccctgcgggtccactttggatagccgctgcgggtcgagattacccagacacgaaccggtgggcgtcgccagaatattgccgtccggcagtaacagcgagaggttgcctgccgagccggtggcatagccgcgctggaaaaacgaggcggctatcctgaccatctcttctcgcaaagcgtgctcttcttttgccagtatcgtcatacctgaaactccctttgagcgcggatgaaaaaggattcatcgccaaaattacctgactttagcgccagcgagactggcgcatggagcgcgttgacccacggcacgccgggtgaaatgcacggtccgatgtgaaaaccggtaataccgaggctttgcgtcaccacgcccgaggtttcgccgcccgccacaataaaccgggtgataccgccttccgctaagcgagcagccagcagggaaaagagcgcctctaccgcatggctggcttcggtagcgccatattgctgctggatggcggccagcgcctgcgtggaggcggtggcgctaatcattggcgccagttcgctgtcctgactgagcacccactgcgccagcgcttcagcgtaggcctcgcgcgtctcggatgacaggcagcgcgccacatcaacgtcgcgtgtgggagcatgttgtcgatagaaagccacctgctgattcgtcatttgcgaacaggaaccggaaagcaccaccgcgcggccgctcagcggatagcctgcggaacgggcctgagaaacgccgtgcttcgcccactgacgcgccagccccattgccagcccggaaccgccggtcaccagcggagcatcacgcaaaacctcgccctggatttccaggtgccgctcattgagcgcgtcaagtactgcgtagcgatatccttcctgctgtaaacgcgacagcgccgcacgggtcgcggcaacgccttcatcaagcgtctgagctggaataacgccgcagcgcccttgcgcctgcgcttccatcagacgcggcaggtagctgtcggtcatcggattgattgggtggtggcgcataccggactccgccagcaagtggttcatgacaaacagatagccctgataaaccgtgcgtccgttaaccggcagcgcgggagaaatcacggtaaatgaggtatccagcgccaccatcagcgcatcggtgaccgggccgatattgccttcggcggtactatcgaaagtcgagcaatatttgaaatagacttgctggcagccctgttttttcagccataccagcgccgccagcgattgttttatcgcctcttgcgccgggcatgagcgggttttcaggctgataaccaccgcgtcgcacccttccggttgcgtcccggttgggacatcattgatctgcactgtcggcatcccgttttcgaccagaaaactggcgatgtcggtcgcgccggtaaaatcatcggcaatgacgccaatttttaacatgacggctcctcaggcgtgacgccaggcagagtaatccccgagaaaattttgatcacagcgctgtcatcctctttgccataaccggcgttactggcgctggtgaacatatttaacgccgtagaggccagcggtaaggggaagcgcagcgctttcgccgtgtcggcaaccagccccaaatctttgacaaaaatgtcgacggccgaacgcggggtatagtcgccgtcaacgacatgctgcatacggttttcaaacatccaggagttgccggcggcatgggtcacgacgtcatacatcacgtccagaggaataccggcccgcgcggccagcgccatcgcttcggccgccgccgcaatatgcacgccagccagcagttgatgaatgattttgacggttgagcctgcgcccggcgtatcgctgatgcgataaacgttgctggcaacggcgtccagcacaggcttcaggcgggtaaacgccgcctcgctcccggaggccatcaccgtcatttcgccctgcgccgcttttactgcaccgccggaaaccggcgcatccagcatgttaagattcaatgccgtcaacgccgcggcgatctcttgcgcgtcggcgcttgagatcgtggacgaaaccatcaccgcgcttccgggtttcatcagatgggcgacgccatcctcaccgaataacacctgtctgacctgggcggcattgacgaccagaatgactaacgcatccacgacgccggcgaactccctggcgctggcggcagccccacaagccccttcagcgagcagattcgcgcacgcttgcgggttaagatcggccccccatgtggaaagcccggcgcgcaggcatgaacgcgcagcgcccattcccattgagccaagccccacaatgccgacatgaaaatcggttcctgttgtcattatcactccatgttaatttacgtgatattatgttttgttatgtgaatataggcgtttttgtaaacaattgcggtgagttgtttcacaaaaaataacaaaatgtgttattttttgtgaaggcaatcctcatagaacttcacacgctgtgacgagaaatcgcgtaaaatcgcgacaggactaaagaaaggagcagacgttgatacctactgagcgtcgacaaatcattcttgatatggtagcggagaaaggcatcgtcagtatcgctgaactgaccgagcgcatgcatgtatcccacatgactatccgccgtgacttacaaaaactggagcagcaaggcgcggtaatccaggtctctggcggcgtgcaatcatcgactcgcgtggcgcacgaaccctcgcatcagatcaaaaccgaactggcgacgccgcagaaagcggcaattggcaaactggccgccagcctggtacagccagaaagctgtatctaccttgatgcaggtacgaccacgctggcgattgccaggcagctggttacgatgaataaacttacggtggtgacgaatgatttcgttatcgccgattacctgatggacaatagcaattgcacaattattcacactggcggggcggtatgccgggaaaaccggtcgtgcgtcggtgaagccgcggcgacgcttttgcgcgggctgatgattgaccaggcctttatttccgcctcttcctggagcgtgcgcggtatttcaacgccggcagaagataaagtcacggtgaaacgggccgtcgccagcgccagccgccaaaaaattctggtgtgcgacgcgaccaaatacggccaggtcgcgacgtggctggcgttaccgctggcggaattcaaccaaatcgtcaccgatgacggcctgccggaaagcgcaattcgggcgctggccaaagtggatatctcactgctgatggccaaacaatagcgaagcggcgcaagccgcttacgtcatcatcttgcgtaccagttgcgtaaactgttcgcgttcttcagcgctcagtcgccccaaaaactcatcgtcaacgcgatcccccagtggtatcgcggcggtgagcaacgtttggccctgaacggtgagatagacaaaacgccgacgtttatccagcggatcgttttctcgttttaccagcccacgattttccatccggcttaacatctccgccagcgtcgctttagtgctgaccgccgcttcggtcagatcgacctgttcaatacccggatgttcagcaataacgcgcatcaccgcatattgaggtttggtgagctccggtagttcatgctgccagcgtgcggtatgttgctgaaaaagttggcgtaacagatgaaacgcggtgtttcgtaactccatgagcgctccggataaattaactttttctatcataacgacttatgcacggttttttaatgacgaatgctttagctaaacgtgcgcaggcgtcgggagcgatcttgtcgcaaaggccgtgtgggcgtattttgatcaaaatgttcgtatacgaacgatatttgaggtaagaaatgagattgattgtggggatgaccggtgcgaccggcgcgccgcttggcgtcgagctactccaggcattgcgggcgatacctgatgttgaaacgcatctggtaatgtcaaagtgggcgaaaaccactattgaactggagacgccctacacgcccgctgaggtagccgccctggcagattattgtcatagcccggccgatcaggcggcgaccatttcctccggctcatttcgtaccgacggcatgattattatcccctgcagtatgaaaacactggcgggggttcgcgccggctatgccgaggggctggtgggacgcgctgccgatgtcgtgttgaaagagggtcgcaagctggtgcttgtgccgcgggaaatgccgctcagcacgattcatctggaaaacatgcttgcgctttctcgtatgggggtggcgatagtgccgcccatgcccgcgttctacaacctgccgcaaaccgttgacgatattatccagcacatcgtagcgcgcgttctcgaccagtttggtctggagcatacgcgcacgcgccgctggcaaggactgcgacagacagcaaatttttcacaggagaatggataatggcatttgatgatttgcgcagttttttacatgcgctggatcagcagggacaactgctgaaaatcagcgaggaagtgaatgcggagccggatctcgcagccgctgccaacgcaacgggacgcatcggcgatggcgcgcccgcgctgtggtttgacaatattcgtggttttaccgacgcccgcgtggcgatgaataccatcggttcctggcagaaccatgccatctcactgggtttgccgcctaacacgccggttaaaaaacagatcgatgaatttattcgccgctgggacaattttccggtagcgccggaacggcgggcgaatccgggctgggcggaaaataccgtcgacggcgacgcgatcaacctgtttgatatcctgccgctgtttcgtctgaacgacggcgacggcggattctatctggataaagcctgtgtggtatcacgcgatccgctcgatcccgataacttcggcaagcagaatgtcggcatctaccgcatggaagttaaaggcaagcgtaagctgggtctgcaaccagtgccgatgcatgatatcgcattgcacctgcacaaagctgaagagcgcggggaagatctgccgattgcgatcacgttgggtaacgatccgatcattaccctgatgggcgcaacgccgctgaaatacgatcagtcagagtatgaaatggcaggcgcgctgcgtgaaagcccctatcctatcgccaccgcgccgctgaccggttttgatgtgccgtggggatctgaagtcattcttgaaggggtcatcgaaagccgtaaacgtgaaattgaaggaccgttcggcgaatttaccggccactattccggcggtcgcaacatgaccgtggtgcgtatcgataaggtctcttaccgcagcaaacccatttttgaatcgctctatttgggtatgccgtggacggaaatcgactacctgatggggccggcgacctgcgtgccactgtatcaacagctgaaagccgaatttccggaagtgcaggcggtaaacgccatgtacacccacggcttgctggccatcatctcgaccaaaaaacgctacggcggctttgcccgtgcggtgggcctgcgagcgatgacgacgccgcacggtctgggatatgtgaagatggtgatcatggtcgatgaagatgtcgatccattcaatctgccacaggtgatgtgggcgttgtcgtcgaaagtgaatccggcaggcgatctggtacagctaccgaatatgtccgtcctggaactggatccgggctcaagcccggcggggattaccgacaagctgatcattgacgccaccacgccggttgcgccagataaccgtggtcactatagccagccggttgttgatttaccggaaactaaagcctgggctgaaaagctgaccgccatgctggccaaccgtaaataaggagtaaccgatgatttgcccacgctgtgccgatgcacatattgaactcatggcgacttcgccggtaaaaggagtctggacggtatatcagtgtcagcattgtctgtatacctggcgcgataccgaaccgttacgccgtaccagccgcgaacactatccacaagcgtttcgcatgacgcaaaaagatattgatgacgcgccaatggtgccgagtatcccgccgctgctggcagaagacaaacggtaaaaaaaaggccagtcgacagactggcctttttttgacaagggtacttactcgcggaacagcgcttcgatattcagcccctgcgtctgcagaatttcgcgcagacggcgcaggccttcaacctgaatctgacgaacacgttcacgcgtaagaccgatttcacggcctacatcttccagtgtcgcagcttcatatcccagcagaccgaaacggcgcgccagcacttcacgctgtttggcgttcagttcgaacaaccatttgacgatgctctgtttcatatcgtcatcttgcgtggtgtcttccggaccgttctctttttcatcggccaggatgtccagcaacgctttttcggaatcaccgcccagcggggtgtctaccgaggtaatgcgctcgttgagacgaagcatacggctgacgtcatcaaccggtttatccagttgctctgcaatttcttccgcactcggttcgtggtccagtttatgcgacaactcacgtgcggtgcgcaggtatacgttcagctctttaacaatgtgaatcggcaagcgaatcgtacgggtttggttcatgatcgcccgttcgattgtctggcgaatccaccaggttgcgtatgctgagaagcggaacccgcgttccgggtcaaacttctcgactgcacggataagccccaggttgccctcttcaatcaggtccagcaacgccagtccacgattgccataacggcgggcaatttttaccaccagacgcaggttactctcaatcatgcgacggcgagaagcgacatctccacgcagtgcgcgacgcgcaaaatagacttcttcttcggctgttaacagtggtgaatacccaatctcaccaaggtaaagctgagtcgcgtccaacacacgctgtgtggccccttgcgataacagctcttcttcagccaggtcgttatcactgggttcctcttcactcaaggctttttcgtcaaaagcctctactccgttctcatcaaattccgcgtcttcatttaaatcatgaactttcagcgtattctgactcaaaaggtggctcctacccgtgatcccttgacggaactagcaagtcaaagcctggttccgccgctttatcgctgcggtaaataacgcagcgggtttacggatttccccttgtaacgaatttcaaaatgcaagcgtgtagagctggtgccggtgctacccatagtagcgattttttgccccgccttaacttcctgttgttcccggaccagcatcgtatcattatgggcgtaggcactcaggtaatcatcgttatgtttgatgataataagattaccgtaaccacgcagtgcgttaccggcatatacgacgcgcccatcagcggttgcgacgatagcctgtcccttactgcctgcaatgtcgatccctttattgcccccttcggaagcgccaaagttttcgatcactttgccatccgtcggccagcgccatgcggaaatcggcgcgctggttgacgtactgcttgcatttggttcggtcgtgcttaccgttggtgccgttacaggcgctgtgacaaccgtcccagcaggcttgttgtttggcaacattttgttagcactttgttcacctgagccctcagaatacgtaattgttggttgagacgcaactgcaacggtggaattttgtgcagacctggtcacaactccttgctgtgctgcatccgcctgggtgatcgcatttccgccagtaattggcgtaccggatgcgttaccaacttgcaaagtttgccctacattcaggctatacggggcagaaatactgtttctctgggccagatcgcggaaatcgttcccggtaatccaggcgatgtaaaaaagcgtatcaccctttttcacggtgtaagtactgccacccgtatagctacctttcggaatattcccatactggcgattgtatacgattcgcccattttccatctgcacgggttgttccgtgaccggttgagtttgcatgggctgcgttacaggacgctgaacgggttgaatttgcggcgcttgttgcggcgtttgttgcgtcgtcgcgcccatttttggcggcggtgtgatcaacatcccggaattggtatttgatgacgaaccactgtccacagacgtgaccggcgccggagggtttgacgaactggtacaacctgccagccatagtgaaaccagtgatagtgccgcaatgcgactaacggtgaattttgggcttcccgcgctcatttatcccccaggaaaaaatttggttaacaaccagtgacgtaagaaccgtgcaacgcattaagtgaacacgggaaaatgtgttcacgatacgcttaacccaccgggaataaccaggaaaactccaggtattcgtttcggcttcatcaggcgtaagagtgggtgtttgcagggcaaactaggccagctctcccttgactaacgggacgaagcgaacggcctccacggtatcgataataaattcgccgccccggcgacgcacgcgtttcaaaaactgctgctcatcgcccacgggcagaacaagaatgccgccttcatccaactgtgccatgagcgcggtaggaatttccggcggcgcggccgtcacaatgatagcgtcaaatggcgcacgcgcctgccagccttgccagccatcgccatgacgggtagaaacattatgtaaatcgagctgcttcaggcggcgacgcgcctgccattgcagccccttaatccgctcaacggagcaaacgtgatgtaccagatgcgccagaatcgccgtctgatagccggaaccggtaccaatttccagcaccctggattgcggcgtcagttcgagcagctccgtcattcgcgccaccatatagggctgcgaaatcgtctgaccctggcctatcggcaaagcgatattttcccaggccttatgttcaaacgcttcatcaataaatttctcgcgcggcactgcagcaagcgcattaagcacctgctcatctctgatgccctgcgcgcgcaattgttcaagaagagcctgtacacgtccacttaccattgcgtgccaactcccacgctgtctaaccagtctgaaaccacatcatgcgcgctgtgcgcggttaaatccacatgcaacggcgtgacggagacgtagccttcatccaccgccgcgaaatcggtatccggcccggcatcgtatttatcgcccggcgggccaatccagtacaatgtattaccgcgcggatcttcctgcgggattactttatccgctggatggcggctaccacagcgagtcacgcgaatgcctttaacctgcgctaacggtagatccgggacattcacgttgagaatacgcccggtacgcaacggctcccggcttaaccctcgcaaaagcgcgcaagtcacggccgcagccgtatcataatgctgatagccgttaagggagaccgctaatgccggaaagccgagatgacgaccttccatcgccgcggcgacagtaccggaatagatcacatcatcgcccagattcggacccgcgttaataccggaaacgacaatatccggacgcggacgcattaaggcattaacgcccagatagacgcaatcggtcggcgtccccatctgtacagcgatatcgccattatcaaaggtaaaagtacgaagcgaagattccagcgtgagggaattagacgcgccgctgcggttacgatccggggctacgacctgtacatcagcaaactcacgcagcgctttcgccagcgtttgtataccgggcgcgtgaaccccgtcatcgttactcagcaatatgcgcataatcacccattgtgttgatcagttcccttactacgctggtggcaaaactgcctgcgggcagccagaaacgtaactcgacggtaacgtcatcccaccagttccagcttaattgttgcggataaagcagcatcgctctgcgcgacgcctctactttttcgcgcagcaacagcgattgcaacaccgtttcctgggcaatggcatcttgctcaaacgccagcgccgcacgctgtgttccccactctccgctgcccggcaacgacgctgtaatcatcagctctttttcgtctacccggcgctgcaattcaggcagttcttcagatgtcgcgacgaaccagcttccacgccccgctaattgtagcgcatcgccgtcaacaacttgattaaagtctggtttcttcagccgctggtgaacaatttgattaaacaacgcgctacgcgccgccgacaaccaaaaactgcgtttattgcgatcgcgcaccggcgcgttactttgcgcccagcgcagcgcgccctgcaagttgctgccgccaatgccgaatcgttgtgcaccaaaatagttcggcacgccgccatcgcgaatcgcctgcaatcgtgtttcgacatcgcggcgatcgcttatttcacgcaacaccagagtaaaggcattgcctttcagcgcgcctaaacgcagcttacgcttgtgacgcgcgtattccagcactttacaaccttccaactgaaaggcgctgaaatcgggcatctctttccccggcacgcgcgcgcacagccactgctcggtaacggcgtgtttatctttttgcccggcaaagctcacttcgcgagcgtgaattttcaggaatttcgccagcgcgtcagcgacaaaacgggtattgcaaccgtttttcaaaatacgcagcaaaatgtgctcgccttcaccatccggcgtaaagcctaaatcttcaaccaccacaaaatcttccggattcgctttcagcaatccgctaccttgtggttttccgtgcagccaggtgagattgtcaaactctgtcatttcgccgccttcatcagcaacgcgaccgcttcgcaggcaatgccttctccgcgtccggtaaatccgagcttttccgtcgtcgtcgccttcacgttaacctcatccatatggcagccgagatcttcggcgataaagacgcgcatttgcggaatatgcggcagcattttcggcgcctgcgcaataatggtgacatccacgttgccgagggtgtaccccttcgcctgaatacgacgccaggcttcacgcagtagttcgcggctatccgctcccttaaatgccggatcggtatccgggaagagcttgccgatatcgccaagcgccgccgcgcccagcagcgcatcggtcagcgcatgtaacgccacatcgccatcggaatgcgccaatagccctttttcataagggatacgcacgccgccaataataatcggcccttctccgccaaacgcgtgtacgtcaaaaccgtgtccaattcgcattatgctttctcctggtggatggttcgggtcagataaaattccgccagcgccagatcttccggacgggtgaccttgatattatccgcgcgaccttctaccagcgccggatgaaaaccacaatattccagcgctgacgcttcgtcggtgatggtcgcgccttcattcagcgcacgcgtcagacaatcgtacaagagttcgcgggggaaaaactgcggggtgagcgcgtgccataaatcggcgcgctctacggtatgggcaatagcgttcttccccggttcgccgcgtttcatggtgtcgcgcaccggactggcgaggataccgccgacccggctgttttcgctgatagccagcaaccgcgcaaggtcatcctgatgcaaacagggtcttgccgcgtcgtgcaccagcacccactgcgcctttgcaacggcctgtaacccggccaaaacggaatcagcgcgttcgttgccgccatccacaacggtgatttgcggatgattcgccagcggaagttgggcaaagcgatgatcgccagggctgatagcaataacaacgcgtgtcacccgaggatgcgccagcagcgcatgaactgagtgctccagaatggttttattaccgattgagagatactgcttaggacattctgtttgcattcggcggccaaatccggccgccggcaccacggcgcaaacgtccaataaagtggctgccatgttaaatccctggatggtttatcgatgagtttgccccgccgttgccgcgcgttttgaggcgtcaggcaccagacgatagaaggtttcgcccggtttggtcatgctaagttcgttgcgcgcgcgctcctctatcgcttcctggccgccattgagatcgtcaatttcggcaaaaagctgatcgttacgcgctttaagtttggcgtttgtcgcctgctgcgcgaccacatcatcgttgacgcggctatagtcatgtatgccgttcttaccgaaccacagcgagtactgtagccagaccagtaaagccagcaacagcagcgttagtttacccatcctgccccctgaaaaacggcatcatcatcccataacgtcctctgtgactccacattcaggacgggattgccgcgacaacgccggcaaatgtaccacatttgccggatgttacgtatacccgagtaaggagaacataatctcattgttggttacggtttgaattatgaccggaggcgcagtgataacccgtctaccctaatagccatataaataacgcgccgaacagcgcgcctacggccagtagagtaaacatgatgctaaaaagtattttgccctttaccagcagatgcaacgcaatgccgataatcaccgataccggcattaacgcgaggaaaaagggccaggtatagaggaaaaaaaacagcgtgttagggccataaagcagaaaagggatccccaacgccagcagccatgacacaaagccgaccaccgcccccggaaatgcactggtggcgtcatcgtcgaccatgaaggcgtctgaccttgtgaaagtaatgttatggctattacgcatattaaatcctgtaaccttgaccataccgggcatacaagcccggtggtgtctcaggatctgataatatcgcgccgtctcagcaggtctaataattgggaaaccaaatttgttactaattgttcaccattaagatgaacctgtggcgagtcaggcgcttcgtaaatggcgtcgatgccggtaaagttacgcaactcgcccgcacgcgcttttttatacaaccctttaggatcgcgctgttcacagatagccagcggcgtattgacataaatctcgataaaacgatcgtggccgacgcgctcttttaccagttgccgctcggcgcggtgcggagaaataaatgccgtcaaaacaatcaggccggcgtccgccatcaggctggccacttcgcctacccgccggatattctcctggcgatcggcatcgctaaagcctaaatcacggcacaaaccgtggcgcacattatcaccatccaacaggtaggtactgacgccacgctgatgtaacgcctcttccagcgcgccggccaccgttgattttcccgaaccggagagtccggtaaaccacagcaccacgccacggtggccgtggagctgttcacgggcggcgacagtaacgggatgagagtgccagaccacgttctcatcatgcagcgccatgtttatctcccagcaaatctcgggcgtcccagtgcggaaaatgacggcgtaccagcgcattcagctccagctcaaacgcactgtattccacgggcggcgtcgctccgcgttcatccagttcccgcaccatgccagcgcccacggtaacgttagaaagtcggtcgataaaaatcagcccgcccgtcaccggattttgctgataaatatccagcgcgagcggctcatcgaatgtcatctccaccagaccaataccgtttaacggcagactttcgacgtctcgttgggtcagattgttgatatcaatctgatagcgaatagcctcgatacgcgcgcgggttttcttacccgcaagtttaacgtcgtagctttggcccggcgccagcggctgttccgccatccataccacgtcgatcgcagcgtgccgcgcaggtgccagcgtctcgtttgccgccagcagcagatcgccgcggctaatatcaatgtcgtcgttgagtaccagggtaatggcttcgcccgcacaggcttcttctttgtcgccatcaaaagtaacgatacgcgccacgctggattccacgccggacggcagcactttaatgcgctctccgactttgacgctaccagacgccagagtgccggcatacccccgaaaatcaagatttgggcgattaacgtattgtactggaaagcgcatcggttgacggtctaccgcacgctgtatgtctaccgtttccaggacttccaacagcgtcgggccgctgtaccagcgcatattggcgctctgcgcggcgacattatccccttccagcgccgaaagcgggacaaagcgaatgtccagatcgcccggcaactgttcagcaaaggtcaggtaatcttcacgaatacgggcgaaggtctcttcgcggtagtcaacgagatccattttgttgattgccaccaccaggtgtttgatccccaacagagtggagataaagctatggcgacgcgtctgatccagcacgcctttacgcgcgtcgatcagtaggatcgccagatcgcaggtggacgccccggtcgccatattacgagtatattgttcatggcccggcgtgtcggcgataataaattttcgtctttccgtggagaaatagcggtacgcgacgtcaatagtaatgccctgctcacgctcggcctgtagcccatctaccagcagcgccagatcgagtttttctccctgcgtgccatgacgtttactgtcattatgcagagaagagagctgatcttcataaatttgcagagtatcgtgcagcaaacgacctatcagcgtacttttaccgtcatcaacgctgccacaggttaaaaaacgcagcaggcttttgtgctgttgggcaatcatccaggcttcgacgccgccttcattggcgatttgttgtgcaagtatggtgttcatggcggctccttagaaatacccctgacgttttttaagctccatcgaccccgcctgatcgcggtcaatcatcctcccctggcgctcgctggtggtagaaaccagcatctcttcgataatttccggcagcgtttgcgcgtgggattccaccgccccggtgagcggccaacagccaagtgtacggaagcgcaccatcctttttttgatgacttcgccaggctggagatcgatacgatcgtcatccaccatcatcaacatgccgtcacgttccagaaccgggcgttcagcagccaaatacagcggcacgatgtcgatgttttccagccagatgtattgccagatatcctgctctgtccagttggagagcgggaagacgcgtatactttcgcctttattaatctgaccgttatagttacgccacaactctggccgctgatttttcgggtcccagcgatggaaacggtcacgaaaggagtaaatacgttctttcgcacgggatttttcctcatcgcgccgtgcgccgccgaacgcggcatcaaaaccgtacttattcagcgcctgctttaacccttcggttttcataatgtcggtgtgtttagcgctaccgtgaacgaacggattgatgcccatcgccacgccttccggatttttatgtaccagcaattcgcagccgtatgcgttggcggtacgatcgcgaaaggcgtacatctcacggaatttccaaccggtatcaacgtgcaatagcgggaacggcaacgtacccggataaaacgccttacgcgccagatgcagcatgacgctggagtctttaccaatggagtacagcatgaccggattagcgaattccgctgccacttcacggataatgtggatactttccgcctccagttgccgcaggtgggtgagtcgtttttgatccataaccgttcctttgcaataccgttttttgctaaacatttcgattacacgactatagggagcgcaggagagtgaatgaaatgacgaattggaatgagtagttcctcaaaggaataacgcggcccaaaaaccaatatcaaaaaatgcttaacgtaccggattgccagcatttaggagcaaatgaaattgtattaacacgatcgcggtttcatactagccacgtaaaattttgttctgtatttaaggactcattatgttttccgcaacgcgccgctttgccgtcattctggcgctcggcgtaggctttatccttcctgcacaagcagcatcaccagggcctggtgaaatagcgaatactcaggcacgacatatcgccaccttttttcccgggagaatgacgggctcccccgccgagatgttgtctgccgattatttacgccaacaatttacccagatgggataccaaagcgatattcgaacgtttaatagccgatttatttataccacgaaggataatcgcaaaaactggcataacgtgacgggcagtacggtcatcgccgcccatgaagggcgcgtgccgcaacagatcatcattatggcgcatctggatacgtacgctccgcagagcgacgctgatgtcgatgccaatctgggcggtttaacgttacagggaatggatgataatgccgcgggattaggcgttatgctggaactggcggcgcgtctgaaagatataccgacccattacgggattcgttttatcgccaccagcggggaagaagagggaaagctaggcgcggaaaatttactcaaacgaatgagtgacgctgagaagaaaaatacgctgctggtcattaatctcgataacctgattgttggcgacaagctctattttaatagcgggaaaaatacgccggaagcggtgcgtacactgacccgcgatcgggcattagcgattgcgcgccgttatggcatcgccgccaacaccaatccgggacgcaatccatcctaccccaaaggaacgggttgctgtaatgatgcggaggttttcgataaagcgggaatatctgtgctttctgttgaggcgacgaactggaatctgggtaaaaaagacggataccagcaacgcgtgaaaaatgcctccttcccgaacggtaatagctggcacgacgtacggcttgataatcaacagcatattgacaaggcgctgccagggcggattgagcgccgtagccgcgatgtagtgcggataatgctgccgttggtaaaagagctggcgaaggcggaaaaaacgtcctgatatgctggtgaaacgtgtttatccccgctggcgcggggaacatttttcagcccttgtcgactgcggaacgcccctcggtttatccccgctggcgcggggaacacgcgaaatagtggggaaaaacccctggttaacccggtttatccccgctggcgcgggaaacactaggccttgataccatcgctcgcacctcgtcacggtttatccccgctggcgcggggaacactcttttgattttgctgcgatgttataaccagacggtttatccccgctggcgcggggaacactatccacatatacccgcaatcatattcaagaacggtttatccccgctggcgcggggaacacaatcactgcgggggtatttagcggaaacggctcggtttatccccgctggcgcggggaacacgatcgagtaacgtgcgctggaacgcgtcggcgcggggaacacaattaaagccgagggtggcaccgcgccttattcggtttatccccgctggcgcggggaacacgcacctcgaaacggttttaaaacactaccgtttcggtttatccccgctggcgcggggaacactggaccgatggggccaacatcgccgaacgtggcggtttatccccgctggcgcggggaacacgttacgttcggtaaatggaaagcggcgaatatcggtttatccccgctggcgcggggaacacccagaaagtgccggtagtgcctgatgaacgaccggtttatccccgctggcgcggggaacaccgcgcccacttccgtaaaatacagataatccacggtttatccccgctggcgcggggaacacggtaatttctcatctaacagcctgtacgcctcaggtttatccccgctggcgcggggaacacgaatctaatgcaacagatgaataaacacgtaacggtttatccccgctggcgcggggaacactctttatcgtcaatgcgaaattttccgcgacgcggtttatccccgctggcgcggggaacactcccattcaccaacaacaatatcgccctgcaacggtttatccccgctggcgcggggaacaccgttgcgtcaggttgatccagtgcgtcagcggcggtttatccccgctggcgcggggaacactctcggtctcggtctcggtctcggtagtgacgcggtttatccccgctggcgcggggaacacacttccttcagtcttaacgataatccgcaacgcggtttatccccgctggcgcggggaacacgcaaaatagcgatgagctggctacgcccactggcggtttatccccgctggcgcggggaacacgaggggataggagttacgatccagcctggttgcggtttatccccgctggcgcggggaacacgtggttgcagaccaatcagcccgccagcggttcggtttatccccgctggcgcggggaacacgtggttgcagaccaatcagcccgccagcggttcggtttatccccgctggcgcggggaacaccagcacgaaaaattatttactgtcgttgctcacggtttatccccgctggcgcggggaacacactaaaactatatatttgttctaaaagcccttttttactacataacaaactaccaacggtaagataacaattccttattattaaagaacattcaacttattgattttcaacaggaagaaaagaaaccaaacgcagtccatccaaatctaccggaatacgtctgttttcaccccaggtctggaactcaaaaccagactcagtatttgttgcccaggccattactacgtttccgactccgccaagctgtgtgatctgttgccaaatcatttcccgaatacgcttcgaggtatcgccaacataaacacctgcacgaacctcgagtaaccagacggcaagacgtccccgcaggcgcggcggtacgttttccgtgaccacaaccaccatactcatcaaccatgcccccgatggccgctatcacccagtgattcaggttccggtattgctggcggcaacatatccggcgcaggctgaggtggttcaatttcaccggcagcgagcacctcttcgatcagtgggatcaattttccggtcagcttcgaactgcgaaaaatatcacggcaggccaggcgcacttctttatcaggttccgccgggtgacgagcagcgatctcaaatgctttgggcaccaccgattcaaatttgatgatatcggcaatgtcataaacaaaagaaagcggcttaccactatggataaaaccgatagctggcgcatatcccgccgccaggatagccgcttctgaaatcccgtacaggcacgatgtcgccgcgctaatacatcggttgacgacatcccccttctcccagtctttcggatcatagttacgaccatgccacttcacgccatactgcttcgccagcaatgcataggtcgcccgcacacgggatccttcaataccgcgcagttgctcaacggaacgacgggcgggcggcggttcgcgaaaacgcagttcatacattttgcgcaccaccttcagccgcaggtcatcatctaacgccagctttgcctgataaagcaacttatcggctcgtgcgccgccgggttgtccggaggaataaacccgcactcccgcctcgcccacccacaccaacagcgttcccaccgtcgatgccagacgcacagccgcatgggaaacccgcgttcccggttccagcatgatacaagcgaccgaaccaacgggaatatgcgtgcggattcccgttttatcgatcagcacgaatgccccatccagcacgtcaatctgaccgtactggaggaagatcattgaggttcgatcttttaacgggatcgggttgagcggcacgaacgtcacgcgtcgtctccaggtttgatcatcatcattccgcagccaaacgcccggcttttaccgaacccctgcgccagacgttgcaggaaaagcgcgggttcgttaatcaccagcacgccggtatagtccacgctgctaaactgaatcatctgccgatctttcccgcgacgtatctgctgctgccgataagcatcaacgctcgcctcgcgcagagtaaagccattttgctccccctggcgcgccaaccacgtcagcgccgcctgctgctgataagaccaaatatcctggctatcaccctgcgttttacgctggcgtttcgcctccatcagcaaatcgtgacgcttgccgtttttgcaaaccgtcggattggcgcgcaggttaaaccgcagcgtctgccccgcgctcagcgttggcgcaaatgggcgagtctgcacgtcaaaaatcgcgctggcggcaggctgttcctgtgagagaacaaaaaagcgaaacgcgccctgtaactcttcgcggcgataaagaaactgccgttccttgctgccgggaaagagatcccataaccactggtgcatcacgtactcgccgcgctccaccagatgcaagagctgtgccggcgaaagctcgctggtgtgcagcgttattcttgagagatacacgcgtcctccttgcggagccacggcccctgattcacgctacgttcaccgaacagccattgctggcggctcaacggcatgtcgcgacgacgtaaaattttgctcgccgttaagccatcgtgttcaccttcccaccagcattcgttctgtaatctggggagaggcagtttcagcgcattgaattgatcctgataccaacgatatgcttcacgcaggacacccgccgcactcccttccagcagttgcggcgcaagcggcaacgccagagggtgacttttgcgccccagatacagcgggaatacaggatgttgtagcgacgtctgaagctgcgccaacgtgtaaggcgcgtccggcgtcgcgctgacagcgatcatccaccaggcgtcggtgtagtagtcgcgtcgggaaatcagcgcgctcagtaattcaggatcctgcaactcttcacggcggctgaagtaacgtgccttacgtacctctttcggcatctgcaccgtgtgataatcccgcgcccagcgcgggttgccactggcgcacagcaaaaattggtaatgacgattgaaggcgtttagccgttcctcctcatcgcggcgaattcccagcgccgcagctaataaccccaacagcgccgagcgcgagggtagctcatggctgtggcgcacttcgcctggcgcatccacgccccaggaggccatcggcccgtgaagctgaaaaaccagatattggctcataagccgccccttacgcgcagatgaagtcaagcacgtcttccatgcttccctgctgattcatcacgtcgaaactggcggtatcagtccgctggccataaaccttattcatattcttatgcagcgatgtaatacgcttaaccgcaacgttcaattggtctgtaccgttgatcggttcataaaacgcggccgccagtgaacgtggttggtcggtgcctttttcggccagcgcccacgaggcataggcacggctggcaaagctgttctgtttgccggtcggcgacactttcagcgccgcttcagtaaaggcgcgcagcgttttgtttgccagttcttcattgtcgttcaggtttttcaccagcagatctttgtcgatgcagatataggtgtaaaacagcgcggagccaaagccggtttcgccgagatggcctgcgcctgcatcttctgccgatgcctggcgtaggtcatccacagcggtaaagaaatcgtcttcgatgatcgtttcgctgacgccgaaggcgtgggcgacctggcaggcggcttccacgttaaaatcagttttcttcgctaacatccggccaaacatggcaatatcgacggccatgcgatcgtgacgtaacagttctgcttcctcttctgttgccggacgtttttcttctgccagacggcgcgccagcgctttcacggcctcaaactcagcagggctgatatgcaccagttgctcggtttcagcattcgtcaactcatctttgggtttcttatcctcttttaccttgccaaagcagttggcgatgttcttgacgtactcaaccgcttttttggcgtcaatgccgctatcaacgaggatttgcgccgcctcacgagcaatgcgaccagtacgaataccaatatggccagctaatgcctgttcaaataactcagatgtacgccaggcgcgtttcaggctctgagaggagatacgcagacgtgttgctccgccaagcaccacggtttttggcgcaccggtatcatcacggttcaggttagcggcggggtaagcggtcagtaaatggagctgaataaacgttgtcataaagatatccctgttaatcttgttcgttatcggtatcgccatcgccggcctggtagtattccagcgcccagcggatacgaagaaattcggttggccgctgctggcggcgatggtggttcagcaagtcattctgctcctggcaccagcagaaaatatcgtctgcaagagaaaacaggttgaccgaaccatctaacagcttcaccgcacgccgtaactggcgcagcagttcatccggcgtttttaccgctaataggtgggagaagcgtaattttgacatcaccggagtgtcgccacctttcttctgtccaagctgcgcagcaaaactcttttgctcatcaataaatttgatatgtgcagccagtgccgctgtgattgccaatgcagtaacattccagggtgctttgtttttccataaagaatgtgtttgcattaacaatgaatgaagcccctcagccaaacaggcatcattcaccgttttactacgtcgtaagctggcacgtaatccacgtttttcttgtagttcctcatgccactgacgcaaagtggctttatcatctttcgtcacaacactcattcagcagcctcctgtttctttgctttggcggcttttgcactttgtttttccgccgatgtcgtaaaatatttcttgcgcgcggtcatgatgcgttccagatcgctgctctcgtaggggttggtaaagacgtgatcatcgaagtaatgacgggtaaacagccaaagttctctttgccatttattcagcctttcgtccggcttgtggccgttttccagatcgtgaatcaggttgagaaaacgtccctgcgtcaggttccagaaatcaatgtcgataaaactgaaatcaccgcgagcacccttcgcatcggcaaaccaggcctctttgagcgcgctgcgaagcaggctcaacaggcgggccgcagtttgcacggccttacgtaaatcagggatcagaccttccgtcatcagcaacgggaagtgatgctcataccagcagcggattttcatattgtcgaaatccgcgccaaagccccagatccccgctttaacgtcagtcagcgagcgggcgttaaacaccttgactacctgcgcgggagattcgtaattcgcttccgtctggttgttctgacttaatcccagccagtcgcgccagataaggccgccgggctgcggtttaacggaaaagaaggcgttttgatcttttaccggggcgcgataaggcgtcagcgggtgccgccagccatcgtagttaacgccgtagttcttgacggtcataaagccaagaagctcatcgctttcagcgccgcaaatatcgcagcaacctgactgtaaggtggcaaaatccaggcggatacgacgcggcatcccccagtacgcctggagtttattgacctgctccggcgtggtaacggcattcgcctgctcgctggtccgcgtcgcggcaagccacgggaaaacggtcgcatcacactggtctggtaaaggcagatccgcagtatcctgcggcatcacgttgagccacagcttgcgccagagcggcgtttgccgctcgccctgatattcctgcaattcaaccagcgtggtcagtggcccgccgccgcgcagcccggtacgatagcctttgccgcccgcaggcgcgttaagctgcaacgagaacagcgccagcgccgcgcagtgcggacaaaaacgttccgttacgccgcgtttgacaaaatgatctttattgaacttcgtggtttgcgcgccaggtatttccggcaacaatgaggcaatagagactttttcgccgcttaacggttcaaaatcctgcataaaagacggcgtttccgcgccaaactgaaaagcgtgttctaacggtgctaatgccttatggagcacatcggcatgcaatccatcaaaccagatatcctcccaatttttgtatcttttcggcgcgatactgcattgcagcaatcccaacagaaactgccaagccgctccctgtaaatctgctcgcgttgcggcgatgtccaccacgttttcatccgccagatcgacgggggccagcttgcccgtggaaccgtctttgaaacggacggggagccagggcgttgttaaaagtgaaaaattgtccatatctgtattcgttattcccccatcatgccaatcaatccctcattcgccgaataaccacaagcggcaaagtccgtcaccacaatcaccgtggcaaaatccttatcctgatgctgttgcgcacaccacttacgcaagggttcgccgtctaatttttcaaactcgtctttatgtttattccaccagctctgacgtactcgcagcacgctcatctcccaggcgtgttcaccgctggcataaggggttacgacgctatccacgattttcgccagccacagcgtgacagactcttccgccagccgcgttgacattttctccggtaaagaatcgctaatttcagcacagtagcccggcgcaaagttaagcagcatctggccggcaaatgcccggtcgcaataaaatttgccttcctgcaattgctcggtttttgcaaatccaaccggcatgttgacatcctcgccgtagaccgactcaatcaacaatcgggcagattgcggcatccgaatcgtcccctgctcacgtaatatgcgctgtgtcagccacatgcgcccatgatcgggatagacataggcgctgttacgcatggcgctggataaccagttctctcgcggcgcgtcatcccactccggagcaagaatgcgcagcactggcgtctctcgctcatcctgcccactctttttcaccagaccgttacgatcgcgaatatgacgctgtagtcgaccggcccgctgaattaataaatccaccggcgctaaatcagagatcatctcatcgcagtcaatatccagactttgttcgatgacctgcgtggcgataatgaccttaccggcacgttgcgcgccgctctgtttgccaaagagattcagcgtctgtgactcaatccgctgacgatcgtaaaaagcaaagcgactatggaagagtaaaaggttttccgtgacgacgaccttactcagttgaagctggcgatagatacgaatcgcatcatcaacggagttacgtatccaggcgatacagtttcctttttccactgcttcacctatacgttcaagacacgcctcttcactatgtagccagccaatatctacgcaacgctcaacctctttgcgtgtatcaacccgctgagaaatcagctctgtttgtgtgacctgagtcagccagggataatcgtcatggcctagcaacggcgcctgcacactacgcctcaccccacgggaaaatgccgccaccagcttatctcgctgctgctgcgatagcgtcgcagataacagaatagtggcgttgccattactggcctgccgttcgatcaaaccttcaagtattcgggacatccaggcatcacaggcatggatctcatcagccagtaagatcttgttgctaagacccagtaaccgcaggttgttatgtttaaatggcattaccgccatcatcgcctgatccaacgtgcctacgccaacctccgccaacaacgcttttttattgctgtcggcaaaccaggcggcgcatccctgactataaggctgcgcttcatcgggttcttccgtaccagaaagagtgaccgaccatattgactgattgaaacgatccattaagcgacgcgcgctatgcgccagaatcaggctgggacgggagtccggctgatacagcgccagccaggtgttcgccatacgttcaaacatcgcgttggctgtcgccattgtcggcagtccaaaatagagtccctgcgctttacctgccgccatcagtcgatgagctaatatgagcgccgcctctgtttttccggccccggtgacatcttcaagaataaagagttgggcgccatccacgttgatatccagctcaagcgccttttgttgtaacggtgtgggatgctgaataaaagggaaaagcgtttctatgcccgtaaaggcagacacattcgccgctgagggaaatagcgtgatggcagtttgtgctttagcgagagcttgctgccagtaggtatcaacaggcattttttccgcagtacgcggaaaataacggctggcagaaccagtccagtcagccagtacaaccgcagcggaaataaaccaggaaagttgctgaaattggtcgataccctcatcttcatcccaggcttcaggcaaagtaattaaaggaaagagcgcttttattctcagaagaaaatctcttgccgcgtctttatcctgctggcgaaaatggtccagctcctggattgcctctggagggcgtccatgatgacctgtagtgactggcatccaaagcgccataacgcgcttacttttacgaactgaaagcgaagaaggaggaaacaattcagggcattcacttagccaggagttccacaacatgtatcccagcgtggtatgcgcgattttttcataatgccgtgtaggctcattaaagatatttaaagcctcatgacggtatagttgctggaaggaatgagcaaactttccaatatcatgccaacataaaatccaggcaaaaaattgcgccgcctgctccttatcctggatgcctaatttttttagatagtggtcaataaaataaatattatttatcaccatccagtaacccacagccgcaacatctaaagaatgccagcaaagcaaatggtaatcatcaccgccgtcagtttctcctcgtcgagactttccccaatagtgatatatcgacacgtaaactccagcatgtggataataaaagcactctacgcctttttaatggtcttttttgttgatatacctcacaaaaattgcacttcctgagattatatttaaatatgcccgctcaattttatatattcttcagaaatatttaccccacgaataattattataaatttttccgcctttttcttctggaagaagcgctcaaagaggcttcctccaatgccttctgcataaaccaaaatttaaaaaaaacgaccatttgcggcgaatcatctaccttttgtctgaattatcgtcaccacaaaggattaccaaccataaatgtgctgtattaataatgtcgttcaaattctctcctgtagtaaactttatctgtttaataaaaaagagagaattgaacgatatattttactccggatattgaataatataaatttgaaggaaaatattatgccagtcactttaagcttcggtaatcatcaaaattatacgcttaatgaaagtcggcttgctcatctgttaagcgcagataaagaaaaagcaatccatatggggggttgggataaagtccaggatcattttagagcggaaaaaaaggaccatgcgctggaagtgttacactccatcattcacgggcagggccgtggtgaacctggagagatggaagttaacgtagaggatataaataaaatttacgcctttaaacggctacaacatctggcctgcccggctcatcaagatctgtttactatcaagatggacgcttctcagacacaatttttacttatggtcggcgacacggtgatcagccaaagcaatattaaggacatccttaatatatcagatgatgcagtgatagaatctatgagtagagaggagagacaattatttttacaaatatgtgaggtgattggttcgaagatgacctggcacccggaattacttcaggagtcgatttcaactctacgaaaagaagtgacgggaaatgcacaaatcaaaacggcggtttatgagatgatgcgtcccgcagaggctccagaccacccgcttgtcgaatggcaggactcacttactgcagatgaaaaatcaatgctggcctgtattaatgccggtaactttgagcctacgactcagttttgcaaaataggttatcaggaggtacaaggtgaagtcgcttttagcatgatgcatccgtgcatctcctatttactacatagctattcaccgttttcagagtttaaaccaacaaattctggttttttaaaaaaacttaatcaggattataacgactatcatgcaaaaaaaatgtttattgatgtaattcttgaaaaactatatctaacccatgaacgttctttgcacattggtaaagatgggtgcagtcgtaatatattactgacataaagatagtcagtaatataaccaatttaaaatccggctgcctgccggatttttcatagcagcaagtataatcataccgcgtaaggacaattacccttcatgcagcccgcactcgcgcttcagcccgaagaagcgtgtctcttcttccgccatacccggctcccatttgcgggtggtgtgcgtatcgcccaccgacagatagccctgatcccacagcggatggtatttcaggccatgcttttgcaggtactggtaaacggtgcgattatcccagtcgataatcggtagcactttaaacacgccgcgctggatagcgagaacgggtaaatgcgcgcggctgccggactgctcgcgacgcagacccgcaaaccacgtctgcgctttcagctcttttagcgcccggttcatcggctcgactttgttgatctcattgtatttctcaatgccctcaacgccctgctcccacagcttgccgtagcgcgcttcctgccaggccggactttcgcccgcgcggtaaactttcaggttgagtttgagtttgtccgttagctcatcaataaactggtaggtttccgggaacaaatagccggtatcggtgaggatcaccgggatatccgggcgaatctggttcaccaggtgcaggctcaccgccgcctggatgccaaagcttgaggagagcacgtattcgccgggcagattttccagcgcccaggccacgcgttcttcggcgctcagtttttccagttgggcgttggtttccgccagagccattacgcgatcgacttttggcaattcattcaatgcgttgagatcgagttgggacatgagttcctcactgtttgccttgcctgatggcgctgtgcttatcaggcctacacagacgccatccggcaattcaggttattcccagaaatcacgcgcgggatcgagcaccgggcgaatgatgcccgcacgcaccgtaaagtcgccgaagccttcacccgcttcacgctctttcgcccagcgcccaatcagttcatccagcgaggccagaatatccggctcggcgatattttctttatacatccgtgggatacgactcccgatgcggttgccaccaagatgcaggttataacgaccaggcgctttccctactaagccaatttccgccagcatcgcgcggccacagccgttcgggcagccggtcacgcgcatcacgatatgctcatcaggaatgccgtgtttttccagaatcgcttccactttgtccgtgaacgacggcaggaaacgctcggcttccgccattgccagcgggcaggttgggaacgacacgcaggccattgagttttcacgctgcggtttcaccgcattcatcaacccgtggtcgcgcgccagcgtctcgatcttcgctttctggctttccggcacgctggcaataatcaggttctggttagcggtgatacggaactcgccctgatgaatcttcgcgatctccagcaggccggttttcagcggacgccccggataatccaggatacggccgttctcaataaacagcgtcaggtgccatttatcatcaatgcctttcacccagccaatcctgtcgccacgcccggtaaactcatacgggcggatcggctcaaatttgatccccgcgcgacgctcgacttccgctttaaatgtctccagtcccacgcgctcaagggtgtatttggttttggcatttttcctgtcggtacggttaccccagtcgcgctgcgtcgtcactaccgcttcggccaccgccagggtgtgctccagcggcagatagccaaactcgctggccgtacgagcgtaggttttcttattaccatgctcaatagacagaccgccgcccaccagcaggttaaagccgaccagcttgccgttctcggcaatcgccacaaagttcatgtcgttggcgtgcagatcgatatcattttgcggcgggatcaccaccgtggttttaaatttacgcggcagataggtctgcccgaggatcggttcttcatcggtggtcgcgaccttctcctgatcgagccagatctccgcatacgcacgggtgcgcggcagcagatgttcggagatcttcttcgcccattcgtaggcttcagcatgcagctgagactcgtacgggttagaggtacacagcacgttacggttcatgtcgttggcggttgccagcgcatccagccccaccgagtgcagcatctggtgcaccggcttaacgttcttcttcagaatgccgtggaactggaaggtctggcggttggtcagacggatactgccgtaaatcgtgttatccgccgcgaatttatcgatcgcctgccattgcgtcgtagtaatcaccccgcccggcaggcggcagcgcagcagcatcgcgtggcgcggctccagcttctgcgccgcacgctcggcgcgaatatcgcggtcatcctgctgatacatgccatgaaagcgtatcagcaggaagttatcgcctttaaaaccgccggtgagaccgtcgttcagatcttccgcaatggtgccgcgcagatagttgctttccagcttcatgcgctcggcatcggacagtttaccttcgaccaccagtgggcctggatgtttttcgctcattagtagacatctcgctgataacggcgctctacgcgcagctcacttaaatattcatctgccgattcgaggtccataccgccgaattcagcgatcacttccagcaatgctttttcgacatctgcggccatgcgcctggcgtcgccgcagacataaatatgcgcgccatcattgatccagcgccacagctcggcgccctgttcacgcagcttgtcttgtacgtaaattttttctttttgatcgcgtgaccaggcgagatcgatacggcttaacaccccctctttcacgtagcgctgccactccacctgatagaggaaatcttcggtaaagtgcgggttgccgaagaacaaccagttcttaccttccaccccttccgccgcgcgctgttgcataaaggagcggaacggcgcgatgccggtaccggggccaatcatgatcaccggcgtttccgggttagctggcaggcggaagttatcgttatgctcaataaagacgcgaacttcgccctcttcttccacgcggtcggcgaggaagctggaagcgccaccggcgcgggcgcggccttcaatgtcataacgaaccacgccaacggtgatatgcacttcgctctccacttcagcctgtgcggaggcgatggagtacagacgcggcgttagcggacgcagcaggtcgattagcgcctgagcatccagctgtgccggagagaaacgcaccatatcaacaatgggcgtggtcgcggcgtaatgctggagctgcgctttgtcgcccactaatggcaacagcgactcactgcgcgtcagggtcgcgtagttctcaacaatgttggcggtattcaccgtcagctcgaagtgccactccagcgcttcggcgagcggcagggttttaccgtcaaccgtcaccggctcatcgcccttcagccacagcaactcaaccagctccttcaccagagccggatcgttctgataccagacgcccagcgcatcgcccggctgatagcgcaggccggagtcgcctaaatcaatctcaatatgacgcacatctttttccgagttgcgaccggtgattttctgattcacggagagggtcgcgatcagcggcgcgtctttagtataggggctggtgtggatgtcgtttaccgcgccagtagcgacggattgcgaaggtgccgcgacaggtgcgcgagacttcagaacatcaaccacgcgggcgcgccattcgctggcagctgcctgatattcaacgtcagcatcgacacggtcgagcagacgttcaccgcccagttccgccagtttgctgtcgaaatcttttccggactggcagaaaaattcataagaggtgtcgccgaggctaaacacggcaaaagcggtgttttccagtttcggcgcttttttggagaacaggaatttatgcagcgcgacggcctcttccggcggctcgccttctccctgggtggacgtcactatcaccaacagtttttcactggcaatctgtttgaatttgtagtcgccggcgttcaccagtgtcacattaaggttggccgccagcagatcatcacgcagcgcttccgccacacgacgcgcattgccggtttgcgaagcggagataagcgtaacccgcggcatcttccgctcaggaacaggcgtgacggcaacagcgcctgagcgcgggttcagtacgccccaaaaatagccggagacccaggcaagctgttcgggagtaaggtcggttgtcgcggcctgaaggcgcgccagttgctccggattaagcggaagcaacccagtcagtggagccggtgtcgtcatgcgtcgttatgttccagtaagcaaagcggatctatacacaaaatcattcaagttcgccgtaagctgatcgcgccccaggagcgtacataaatacgtgactggggtgagtaaacgcagtcaacacagatgcggcttgaaagatgaaatgtataagcgataaatcccaaactgaggataaggttaacggtgagaggaataacaattaaagaagggttggaaataacaaataaccaaatgaactaacctgttttagttatcgttattaacgccaaaatcgattttataattgattgataattattaaattttctggaaattcttaaattaattgcccgtcacaaggcggagaatggttttagttaatgataaaaaatgcgctttccggtaccctacggcggtttttttattgcctgagagttcatcatgtccaccacgttgtataaagatttcacctttgaagccgctcaccgcctgcctcacgtgcctgaagggcataagtgcggccgcctgcacggacactcgtttatggtgcgtctcgaaattaccggtgaagtcgatccgcataccggttggattatggatttcgcggatctcaaagcggcgtttaaaccgacttacgatcgtcttgatcactactatctgaatgatattccagggctgtccaatcccaccagcgaagtgctggcaaaatggatttgggatcaggttaagcccgtcgtgccgctactgagcgccgtgatggtgaaagagacctgtacagccggctgcgtctatcgcggcgaataaggtttattaacgcgtgggctggatgtcaaattgattccagcctatccacacgacgtttcatcagtgaaaacagtccagcgcgtggtgttaaaagcgcagtacatcaccggttgcaggtgcggttatttccggtagccacaaccgcccccaggcccctgtacagtgacaaccgcatagtttttcaggtttatgttcttgcagaaagcgcctgactcgccacagcgtgaacggtgatgcgcagcggagatgaaatccgccgacaagcgcgtaactccgctttataccagtaatattctgacagtgccggacaatatttgcgatcccccgatgcccgcatcccgtaatgatgactaatccttttgtcgattggtaaatcagtacgccctcatccaaaatagagtccggctccgcatcgtggccgccaaaaatgccgtaggcttcaggcgcgaccaccggtatttcccctgaccagataaagttttcgccaatcggcagggggtcacgcgtgtacatcattcgatagcgtgaatagtccacctcacacgacaatttttttatttttcgggtaataccaagaaaagtcattgctgcataacgttcacgtgcaatatcgggatggcagatgattcgactgctatcaggaagccacggcacgccgccgcaatgatcgtaatgaccatgcgaaagcaccacagcagacacatcggacaggtcgatccccatcgccaacgcgttttgcataaaactgccatcagggccggtatcgaacaagatagacgtagactcatcctcgaccaacaggcttaaccctggccggaccttcaacgatttatccgctccagctcccttatgattttcgagcaataccctgatccttaacgccatggccttctcctgtctaaaagcctccccgggaaaacgcggcctttttactttacaggtttgtagctgccattactggtacacagattatgattatgcaacggctatccttgttggcgcggggaacacatcttcatattgcgtgacgctgccgatgaacgcggtttatccccgctggcgcggggaacactctttatcagctaaccatttccagaactcgtccggtttatccctgctggcgcggggaacactataatatgaattaatttttgcgcataacctgcggtttatccccgctggcgcggggaacactgcccgttctgcctcttcgcactctcgatcaacggtttatccccgctggcgcggggaacactgcgtaatgggctacctgaacttcacatatcccggtttatccccgctagcgcggggaacatattaagcgcgcaaagtttgggttaattggacacggtttatccccgctggcgcggggaacaccgtattcgtcacacagccccgtccagaaatgacggtttatccccgctggcacggggaacactaacgaactgaataaaatgtcagaaagtgacgcggcttatccccgctggcgcggggaacacgcagcttagcgacgaaattaaaaccgaactcaccggtttatccccgctggcgcggggaacactgccagtgactacagaagcgtcgctatcggggcggtttatccccgctggcgcggggaacacaccgataaacaaccgcatagcctctttcgtttcgatttatccctgctggcgcggggaacactgctcaataacgtcgtaaatagcgtaagctggcggtttatccccgctggcgcggggaacactatttcgccttcggcactgacgtcaccgtcaacggtttatccccgctggcgcggggaacacgtcgcgttcgttgccggtatagaccagcgtcacggtttatccccgctggcgcggggaacacatcgaatcgaaaccccagccacagaaataattcggtttatccccgctggcgcggggaacacgctcatgtcaaacgccatcagcgttccggcatcggtttatccccgctagcgcggggaacacaatcgccagcctcggaaatattccatcctccgcggtttatccccgctggcgcggggaacacaggaactaaacagcctgaccgttgaggatctgcggtttatccccgctggcgcggggaacacaccggacaaatcttttttttcctgttcctgttcggtttatccccgctggcgcggggaacacgggcactatgaacggatcggcgctgatgccggcggtttatccccgctggcgcggggaacacggtaaagccacaccattttttattgacctcgccggtttatccccgctggcgcggggaacacgtggtggcctcaaataaattcgagcgctggagcggtttatccccgctggcgcggggaacactcgacgtggacgaggagttactcaaccgctgccggtttatccccgctggcgcggggaacacagcgccacatggcccaccggcaccacccgatccggtttatccccgctggcgcggggaacacaaatgaccaaatcagaaatcttcaccaaagcccggtttatccccgctggcgcggggaacactaatggccacagtaagtcaaacggttctggaacggtttatccccgctggcgcggggaacacgagtccgggggttatatagttatttaatgagccggtttatccccgctggcgcggggaacacttgggcgtcggttttttcaggtttaggtccggcggtttatccccgctggcgcggggaacactcaactgtcagttcgtcgttagccagtaattccggtttatccccgctggcgcggggaacacctgaaaacgcatggaatccggtataaacagtccggtttatccccgctggcgcggggaacacgatgtaactgatagcgaaatatattgggataacggtttatccccgctggcgcggggaacacgaaacgtaaacagggtaagatacaactctgcacggtttatccccgctggcgcggggaacacactaaacggatataattgtttataaactactttttgtcagcaccacattctaccaacataatcgcaacaatttaaattattaaagaacagctaatttgctgattttgatgcaaaaaagttcatagaatgattttttctttaaatttaccaaaatagcgtgatccgtgcatcgctatggaaaaatttatcagcgcttttatacactcatcgaaattcacatagagaaaataaacaatgcaaggtaatggatgagtcacagacggcatcggcaggccgtctgtaagattagtaatgcatcaggcgatatttaaatatttatgcgtttgcatagacagcctccagttacgtgcaatacacgtttcaatacacagacgcgtcgcgtcttctttctggctaatgggctgcaaagcaatcacacgcggtttatcatcgctcaacgtggctaacagttcatccagcgcctcaatatcacgaactcgcccaacgggatgcttgatttcattggcgcgctccagcgcctgggaaagcacgtcatatcccccgcgcatattcacttttggtgaaaccgtgacccaggtgttaggcgtacagcgcacttcgtgcgtcccgctggtttcaatctgacaactaaaaccactcttttcaagcagatcggtgagcggcatgaggtcgtgaatacagggttcgccaccggtgatgacaacgtgacgcgcggtatagccctgacgattaattactgccagcaagtcttcactgctcgcagcaccccatttgtcgctctctttggtttttgccagaatgctgaacagagacacttcccgatcgctcagtttatcccaggtatgcttagtatcacaccaggcacagccgaccggacatccctgtaaacgaataaaaatagcggggacgccggtaaaataaccctcgccttgtagggtctggaacatctcgttaatcgggtactgcatagcgttctctattaaggggataatcgttaattattgcagatttcgtctgcccggtcatgcacagcggctgcgctattgaacagatacaaaaaaacccgccgaagcgggtttatacgttaagaggtaaaagcaggattacgcctggcctttgatctctttacgaccgttatacggtgctttttcgcccagagcttcttcgatacgaatcagctggttgtatttagcaacacggtcagaacggctcatagaaccggttttgatctggcctgcagcggtaccaacagccaggtcagcgatggtagcgtcttcagtttcgccagaacggtgagagatgacagcagtatagccagcgtctttcgccatcttgattgcagccagagtttcggtcagagaaccgatctggttgaatttgatcaggatggagttagcgatgcctttctcgatgccttctttcaggattttggtgttggttacgaacaggtcgtcaccaaccagctggattttgtcgcccagtactttggtctggtatgcaaaaccgtcccagtcagactcgtccagaccatcttcgatggaaacgatcgggtactgtttggtcagttcttccaggaagtgggtgaattcttcggaggtgaacgctttgttgccttcgccagccagaacgtatttaccgtctttgtagaattcagatgctgcgcagtccatcgccagggtgatgtctttacccagctcgtaaccagccgctttaaccgcttcagcgataacagccagcgcttcagcgttggaacccaggttcggcgcatagccgccttcgtcacccacagcggtgttcatgcctttgcctttcagcacttttgccaggtgatggaaaacttcagaacccatacggatggcttctttaaccgttttcgcgccaaccggctggatcatgaattcctggatgtcgacgttgttgtcagcgtgctcgccgccgttgatgatgttcatcatcggaaccggcatggagtatttgcccggcgtgccattcagttcagcaatgtgctcgtacagcggcatacctttagcggcagcagcagctttggcgttagccagagagacagccagaatggcgtttgcaccgaagttagatttgttttcagtaccgtccaggtcgatcatgattttgtcgatgccagcctggtctttagcgtctttgccaagaatagcctgagcgatcgggccgttaaccgcgccaacagctttggttacgcctttacccaggaaacgggatttgtcgccatcgcgcagttccagcgcttcgcgggaaccagtagaagcacctgacggagccgccgccatacctacgaaaccaccttccaggtgtacttcagcttcaacagtcgggttaccacgggagtcgatgatttcacgaccgatgactttaacgattttggacattaggttttcctcaagtcactagttaaactaaaacttcagacaaacggtgcaccgctgagggtgcaccgccgttctaacttttttacttcgcctgacgtttctgatgctcgttggcggctttaacaaagccagcgaacaacggatgtccatcacgcggcgtggaagtaaattccggatggaactgacaggccacgaaccacggatgattcggtacctcaatgatctcgactaactgatcatcaccggaacggcctgcgacacgcagacccgctgcttcaatttgtttcaacaacatattgttgacttcgtaacgatggcgatgacgttcaacaatcgtcgacgcgccgtacaactgacgtaccagactgtcatcgctaagctggcactgctgcgcgcccaggcgcatggtgccgcccagatcgcttttctcgctacggacttcaacgttaccgtcttcatcgcgccactcggtaattaacgccacaaccgggtacttacagtctggcacaaattccgttgagttggcgttgtccatgccggccacgttacgagcgaactcaatcaacgcaacctgcatccccaagcaaatgcccagataaggaatattgttttcacgcgcatagcgcgcagtggcgattttaccttcaacgccacgatagccgaagccgccggggatcaggatagcgtccaaatctttcagaatttcgacgccgcgcgtttcaacatcttgcgaatcgatcaatttgatgttgacggtaacgcggtttttcagaccaccgtgtttcagcgcttcgatcaccgacttataggcatccggcagttcaatatatttgccgaccatgccgatagtcacttcgcctgccgggttcgcttcttcgtaaatgacctgttcccattcagacaggttagcttccggacagttcaagctgaatcgtttacaaatataatcatcaagcccctgagatttcaacaggcccggaattttataaatggaatcgacatctttcattgaaataacggctttttccggcacattacagaacaatgcaatttttgcacgctcgttggcaggaaccgcgcgatcggaacgacaaatcagaatatcgggctgaataccgatagacagcagctctttcacggagtgctgagtcggtttagttttcacttcgcccgcagccgccaggtaaggtaccagcgtcaggtgcataaacagcgcgtgttcacgaccgatatctaccgccaattgacgaatcgcctcaagaaacggcagcgattcgatatcaccgacggtaccgccgatttccaccagtaccacatcgtggccttcgccaccttccagcacgcgctctttaatcgcgttagtgatgtgagggatgacctgtacggttgcgcccagatagtcgccacggcgttctttacgcagaacgtcggagtagatgcggccagtcgtgaagttgttgcggcgagacatcttggtgcggatgaaacgctcgtagtgccccaggtccaggtcggtttcagcgccgtcttcagtaacgaacacttccccgtgttggattgggctcatagtacccggatcgacgttgatgtacggatccagtttcatgatggtcacgttgagaccacgggcttccagaatggctgcgagggaggctgcggcaatgcctttacccagagaggatacgaccccgccggtcacaaaaatatagttcgttgtcatgcggaacctgagaagttaggtttaaaagacgatggaataaccaggacgggaaagcagtatacccgaacatgacctacgccacaaactttcattattcctcctcttcgtcaggctgacattcacacagggagggagaaaatagcccctttgaggtaaatgtttttgacgtaaatcaagcgcttgttatttaaaaaatcacacaaatcgctcttgaccgcctaaaacctttagagatcaatttcctggcgttttacttcctgccaaacttcttccattgtttccaggtccaccccggtcatttccaggcctctggctgcgacaatacgttcaacttcgcgaaaacgacgttcaaatttatcgttcgctttttgcaaagcgagctccgctttcgtacctaaatgacgcgccatgttgaccgtggcaaagagcaaatcgcccatttcctcttccagtttagcctgatcaacaaccgcctgccgcgcctcgaacatcacctcatcgatctcttcatagaccttatcgacgaccggtcccagcgtcgtccagtcaaagcccacgtttgaacaccgtttctggattttttgcgcgcgcattaaggccgggaagctgcgcggaatatcgtccagcgcggaatgctgcgctttttgcgcgcgctcttccgttttgatttgctcccagcgaactaatgcttcttcgctattatccgcggaaagctcgccaaaaacatgcggatggcggcgctccagcttgtcgctgatggcagcgcagatatcattaaaatcgaagcggccttcttcctgcgccatctgcgcgtaaaacaccacctggaacaacaggtcgcccagttcgccgcgcaaatcgtcaaaatcctcacgcgcaatcgcatccagtacttcataggtttcttccagcgtataaggcgcgatgctggcgaaggtctgctctttatcccacgggcagccgttttccgggtcgcgcaggcgctgcatgagggtgagaagacggtcaatttgatggttagttgtcatggtttttaatcggttgtaaataccagcgacaattgtaacgtattattcttaaccattcacgcacagagacactacgacaacgcctatataataaaatatattgttaacaggtgttgaatgctacctttcccgtataactttaaaattattaatcgatacacaacaatataataatcatataactaatttattaaaaaaacagatatttgcaccagacgttataaataacatcaattaagtaaaaaaatcatgcaaacactataagcaccccacccaaagagccttccctttcaaaaaaaaataaattatttcacttttacggaaaaacgagtagcatgcacgccagtttaatattcaaaaaagaccgcttttttgttttttctggaacatacatgaaataaatatattgaaagtattacatataatattctatgagcaggtacgatcattcagctcataagaatatactcatagaaatgtagaaatataatatttttattatgacctatttttacccaaagcccgcagcatggctctatgccgcatatcccttggtatacgcgtacaaaatgttgccataaaacacgttaattaaggataacacgatgaagtcatctcatttttgtaaactggcagtaactgcatctttagttatgggaattgtctccggcgctcaagccgcgggtagcaacacagcaaaggtcactttccttggtaatattgttgattccccctgctctctcacacttgttttttagataaaaaggctataaccaatttacatgcttaccagcatcctgattctggctcagaatacgtatcacgataacttccgtaactgattgtataaaatagataatatgccttttaaacggtaaggcataaatgtattcacccagttcaggtcgaggcgtgccaatgttattggcactcataatgctgaatatttctgatagatgattaatatatcgatcggcctgtatttcgccaaaatgctgccagccgtaatgccagatattttccagatcttcactggcctttggcgttaattttaccattctcatcgggtttgatcatccctgttttgaccttccgtaaaaaggcatccttttcccaggcctgcggctctccgctgttcagaccttcagccagaagttcacgtaacgcctgaagtcgtgactcggcctgtttttccctcagcagacgaagagactctctgatcacttcactttgtgttctgtaatcacctgattctatgagcgattcaataaactcgcgcagttcatcgccaagatcaacggtcattgttctggccataacagcctccactgtaagtataaatcttacataagagtacaccggaaatgaaatgtacgtcaaaaacataccccatatctcatgcttatggggttgctaatgcggctttgctgaacgagtagcaaagccgctacatgattactgtctggggtttaccccccgtgcagtcgccgtgcatcaatcacatccggcacctggttcagcttaccgagcacccggcccagcacctgcaggttgtagatctcgatggtcatatcaatggtggcgatctgctgtttaatgtcgctgcggctggcgacgcccagcacgttgactttttcgttagccagaatggtggtgatatcgcgtagcaagccgctgcgatcgttggcctggacgcgcaccaccagcgaatatcccgccgagtagctctcgccccataccgcctctacgatccgctccggcgcatgggagcgcagttccgccagctgttcgcagtcggcccggtgcacggaaatccctcgcccttgagtaatgaagccgacaatttcatcccccggaatcggctggcagcagcgggcgatgtggtgcatcaaattacccacgccttctaccaccacgcgcccgtcgtctttacgacgattttgcggcgcgtatgttttttgctgaagctgtttcagcgccgctgcatcctgctcctctgcactcggcttattgaactgtgattgcaggaaattcaccatctgattaagacggatatcgccgccgcctatcgccgccagcaactcttccagctcattaaagttgtagcgcggcagcagatgtttttcggcctctttcaggctaatccccaaatgcgccagctcatcgtcgaggatctgccgtccagcctggatatttttgtcacgatcctgcttgcggaaccaggcgtgaattttcgagcgtccgcggctggtcgtcacatagcccaggtttggattcagccagtcgcggctgggattcggctgcttctgagtgataatttcaatttgatcacccatctgcaactgataggtgaatggcacaatacggccgccgattttagcgccaatgcagcggtgcccaacatcgctgtggatgtggtaagcaaaatcgagcggcgtagatccggcaggcaagtcaaccacgtcgccttttggcgtaaaaacgtagacccgatcgtcaaacacctggctgcgcacttcatccagcatttcgccggaatcggccatctcttcctgccaggcgatcagcttacgcagccacgcaattctgtcttcatgaccggagcgcacgccgccggacgcggcgccttctttatacttccagtgtgccgccacgcccagttcggcgtcttcatgcatctgtttggtacggatctggatctcaacggttttaccgcccggtcccaggaccacggtgtggatagactggtaaccgttcggtttcgggttagcgacataatcatcgaattcatccggcaggtgacgatagtgcgtatgcactatccccaacgcggcgtagcagtcctgcagacgttcagcgacaatacgcacggcgcgcacgtcaaagagttcatcaaacgccagatgctttttctgcattttgcgccagatgctataaatatgttttggtcgtccgtagacctccgcctgcacgccttcgtttttcatttcggcgcgcagatgtccaacaaactcttcgatgtaatgttcgcgatcgagacggcgctcatgcagcagtttggcgatgcgtttgtattccgccggatgcaggtagcggaaacagtagtcttccagttcccacttcagttgcccgatgcccagacgattggcgagcggcgcatagatgttggtacattctttcgccgccagcacgcgctcatcttccggcgcctctttcacttcgcgcaaatgagcgattcgctcggccagtttgatcaccacgcagcggaaatcatccaccatcgccaataacattcgacggacgttatcaacctgctccgaagaaacagagtcgttatgagtggcgtttagctgacggatcgccgccatatcgcgcacgccatgaatcagggtaacgatagatttgccgacgctttcgcgcagtacatcttcgctgactacgttggcgtcggccagagggaacagtagcgccgcccgcagcgtgtcgatatccatactcagcgtggaaagaatttctaccatctccacgccacgccacagcaacagatccgcatccggatgtccttgtgtctgttgcaggcaatacgcccaggtttcggctaagcgctcacacgactgctggctggaaattcccaggcttgcgatccacttcttcggatcaaattcaccagctttattaatatgtgcacttcttaccgcgaccatcgtcctctccttaagggaccaggcctaccgaagtcggtaagccggtaatcattacatgcgctcgaacagaaccattgattccagatgtcctgtgtgcgggaacatgtcgagcatcgctaaacgcgtaacctcatatcccgcattgaccagcgcttcactatcgcgcgccagcgtcgccgggttacaggatacataaacaatgcgaataggttttaattttataatatgtcgcatcactcctgtagcccccgcacgcgcaggatcgagtaagactttgtcaaagccgtttttcgcccacggctgcttcgtgacatcttcctccaggttctcatggaagaatgtcacattatgtaaaccattgcggatggcgttttcacggcctttttctaccagcgccggaacgccctcaaccccaatcacgcttgccgcgcgcgttgccagcggcagcgtaaaattccccattccgcagaacagatccaggacacgatcctcggcgcgcacatcaagccactccagcgcgcgggcgaccatttgctggtttaccgcctcattaacctgaataaagtctcgcggactgaaggctaaacgtaagccgtgcgaatcataccagggcgcctcgccagataccgtttccagtatctcgctaaacggcgccagaaacagagacaatccctcagaatgcgaaaagcgttccagtttttctttatccgccgcacttaatggcgcggtatggcgcagaatcatcagcgtaccgcttcccgcctgtaccagctcaacatgcccaagatgtcgggtgccgtgtaaactcgccagacacgccctgattcggggcagcaatgctgcaagctggggcgccaaaacggggcactgttcgacattgacgatatcgctggaacccgctttgcgaaatcccatttgcagcggtttatccggcgggcaattcagacttaaccgcgcacgacgccgataaccccaaggcgcgccggcgatgatgtcattcacctcgtgtttcatcaaacgcgccagcgccgcgcttttgctgcgttgttgcagggcgatgctgacatgctgttgctgacaaccgccgcagacgccaaaatgcgggcagcgcggcgtttctcgttccgggctatcattcaaacggcgcgaaacgcgtgcgcgggcaaattgctttttatcttctgtaataatgacttctgcgctttcctcaggcaataaaccggggataaacagcgcttttccgttatgacgggctacgccctgaccaaatgaatcgaggtcattgactttaacggttatgatctgacgcgtcgtcacgcgccgttttgcagagtagaattgcgccatcgaccagctttttctcaatttaacagtgtgaccctaattgtcccataacggaactccatgaccaactacagcctgcgcgcacgcatgatgattctgatcctggccccgaccgtcctgataggtttgctgctcagtatcttttttgtagtgcaccgctataacgacctgcagcgtcaactggaagatgccggcgccagtattattgaaccgctcgccgtctccagcgaatatggtatgaacttacaaaaccgggagtctatcggccaacttatcagcgtcctgcaccgcagacactctgatattgtgcgggcgatttccgtttatgacgatcataaccgtctgtttgtaacgtctaatttccatctggacccctcacagatgcagcttcccgccggagcgccgtttccacgtcgtctgagcgttgatcgccacggcgatattatgattctgcgcaccccaattatctcggagagctattcgccggacgagtcagcgattgctgacgcgaaaaataccaaaaatatgctggggtatgtggcgcttgaactggatctcaagtcggtcaggctacagcaatacaaagagatttttatctccagcgtgatgatgcttttttgtattggcattgcgctgatctttggctggcggcttatgcgcgatgtcaccgggcctatccgtaatatggtgaataccgttgaccgcattcgccgcggacaactggatagccgggtggaaggatttatgctgggcgaactggatatgctgaaaaacggcattaattccatggcgatgtcgcttgccgcctatcacgaagagatgcagcataatatcgatcaggccacttcggacctgcgtgaaacccttgagcagatggaaatccaaaacgttgagctggatctggcgaaaaagcgtgcccaggaagcggcgcgtattaagtcggagttcctggcgaacatgtcgcacgaactgcgaacgccgctgaacggcgtcattggctttacccgcctgacattaaaaacggagctgaatcccacccagcgcgaccatctgaacaccattgagcgttccgcgaataatctgctggcgatcattaatgacgtgcttgatttctccaagctggaagccggtaagctcattctggaaagtatcccttttccactgcgtaatacgctggatgaagtggttacgctgctggctcactcgtcgcatgataaagggctggagttgacgttaaatattaaaaacgacgtcccggataatgtgattggcgacccgctgcgcctgcaacaggtcattactaatctggtgggtaatgccattaagttcaccgagagtggcaatatcgacattctggtagaaaagcgggcgctcagtaacaccaaagtacagattgaagtgcagatccgcgatacggggatcggcattccggaacgcgaccagtcgcgactgtttcaggcgtttcgccaggccgatgccagtatttctcgccgtcacggcggcaccgggcttgggctggtgattacgcaaaagctggtcaacgaaatgggcggggatatctctttccacagccagcctaatcgcggctcgaccttctggtttcatattaatcttgatcttaacccaaatgtcattattgacgggccgtcgaccgcgtgtctggccgggaaacggctggcttatgtcgaaccgaatgctaccgccgcgcaatgtaccctggatctactgagcgacacgccggtggaggtggtttacagcccgaccttctccgcgctgccgttagcgcactacgatattatgattttgagcgttccggtgaccttccgcgagccgctcaccatgcagcatgaacgtctggcgaaagcagcgtcaatgacggactttctactgctggcgctaccttgccatgcgcaaattaacgccgaaaagctgaaacaaggaggcgcggcggcctgtctgttaaaaccattgacgtcaacgcgcctgttgccagcgctgacggaatattgccagttgaatcaccatcctgaaccgctgctaatggataccagtaaaatcaccatgacggttatggcggttgatgataatcccgctaatctgaagcttatcggcgcgttactggaagataaagtccagcacgtagagctttgtgatagcggacatcaggcggtggatcgggcgaaacaaatgcagtttgatctgattttgatggatattcagatgccggatatggacggcatacgcgcctgcgaattgattcaccagcttcctcatcagcagcaaacaccggttattgccgttacggcacatgcgatggccgggcaaaaagagaagttgctcagcgcgggcatgaacgactatctggctaaaccgatagaagaagagaagttgcataatctgttgctgcgctataaacctggcgccaacgtagcagcgcgcctgatggcgccggaaccagctgaatttatcttcaatccgaatgcaacgctcgactggcagcttgcgctccgccaggctgccggtaagcccgatctggcgcgggatatgctgcaaatgctgattgattttctgccggaagtgcgcaacaaaattgaagaacaactggtgggagaaaatcccaacggcctggtcgatctggtccataagctacacgggagctgcggctatagcggcgtaccgcggatgaagaacctttgccagcttattgagcaacagcttcgcagcggcgtccacgaagaggagctggagcctgagtttctggagctgctggatgagatggataatgtcgcgcgtgaagcgaagaagatattaggctgatattcgccggatggcggcgtgaccgccttatccggcctacaactcagcgtaactgttgccccgctttcagcgttgcagccacgttgcgcgcggtcattcgtacgttttcactcgcattcttcagcgcgtcctccagcgtgcagatggtataaatcacgctgaaaaccgcatcaagcccatgttcatgaaccacgctaacgtccgccgtcaggctacccgcaataccaattaccggcttgttataccgtttggcgatgtttgccacgccaatagggactttaccgtgaatggtctggctgtcgatgcgtccctcgccggtgatgactaaatcagcatccgcaagacacgcttccagatgaagcgcatcggtgacaatctcaatgccacgccgtagctgcgcgccgcaaaacgcgtataacgccgcccccatgccgcctgccgcgccgccgcctgccagatccaacacatcgacatgcagatcgcgggcaatcaaatgcgcatagcgagtcaatgccgtatccaggcgttcaatcatttccggcgtcgcccctttttgcggaccaaaaaccgcagacgcgccctctttgccggtaaggggattcgtgacatcgcaggcgacctctatatggcacgccgacaaacgcttatccaggccgctgatatcaatgctggcgagtgtttccagcccaatgccgccttgcgcaatatcattgccctgcgcatcccgtagcctggcccccagcgcctgtaccatccccgcgccgccatcgttggtggcgctaccgccgataccaataatgatatgctcaacgcccgcatccagcgcatgacggatcagctcgccggttccccatgacgtggtcttcaacggatcgcgttgcgcgggcggcacctgctccagcccgctggcggccgccatttcaatgaacgcggaacgcgcatcgccggaaagcccataaaacgcattgacgcgatgccccaacggcccggtgacctcaacatgcacgattcgacccgccgtcgcttcaaccatcgcttcgacagtaccttctccgccatcagccagcggcaatttcaggtaatcggcgtcaggccagatctcgcgaaatccttgttcaatggcggtcgctacctcaagagcactcaaactttccttatacgagtctggtgcgatcactattttcataagtcgtccttacgcatgttgatcctgttaagcatacacccagagaagaaccggttccttacggaaccggctctgacttaacgcaccatgcaaggacgcttattatcaaacgtccagccaggaattaagtactgcattcccatcgcgtcgtcacgcgcgcctaagccatgtttttgatagagctcatgcgctttcatcacctgatccatatcgagctcaacgcccagacccggtttggtcggtacttgcaccatgccgcctttaatttcaaacggttctttagtcagacgttggttgccttcctgccagatccagtgggtatcgatcgcggtgatcttgcccggcgccgccgcggcaacatgggtaaacatcgccaacgaaatatcaaagtggttgttagagtgcgagccccaggtcagaccgaactcatggcacatttgcgccacgcgtacagagccttgcatagtccagaagtgcgggtccgccagcgggatatcgacggattgcagcgacagcgtatgccccatttgacgccagtcggtcgctatcatattggtggccgtcggtaatccggtcgcgcgacggaattccgccatcacttcacgaccagaaaaaccctgctccgcgccgcacggatcttctgcataggccagagaacctttcaggtatttaccaatgctgatcgcttcgttcagcgaccaggcaccgtttggatcgagcgtaacgcgcgcttgtgggaaacgtttcgccagcgccacgattgactcggcctcttcttcgcccgccagcacgccgcctttcagtttgaagtcgttgaagccgtatttttcataggcagcttccgccagacgcactaccgtttccggcgtcatcgcctcttcatggcgcagacgataccagtcgcattgctcatccggctggctctgatacggcagcggcgtggccttgcgattgccgacaaagaacagataacccagcatttcgacttcgctgcgctgctgaccgtcgcctaacagcgaagcgacgttgacgcccaggtgttggcccaaaaggtcaagcattgccgcttcaatgccagtcaccacatggatagtggtacggagatcgaacgtttgtaagccgcgtccgcccgcatcgcgatcggcaaactggttgcgaacggcggtcaggacatttttatattcacccagcgtttttcccaccaccagtgggatcgcatcttccagcgttttgcgaattttttcgccgcccggaatctcgccaaccccggtatggccggagttatctttaataatgacgatgttgcgcgtgaagaacggggcgtgcgcgccgctcaggttcatcagcatactgtcatgacccgcaaccgggataacctgcatttcagtcactacaggcgtcgtaaattgagtactcataactgtgtccttattcagaattagtgacgaccaaaaacagggcgtttgcggtcaaaagtccagccggggatcaggtattgcatcgggcctgcatcattacgcgcgccgcctggcagctttttatacgcgtcatgcgcttttcgcacctgttcccagtcaagctccacgcccagtcctggcgcatccggaacggcaattttgccgtttttaatttccagcggatttttagtcaggcggcaatcgccctcctgccagatccagtgcgtatcaatagcggtgggtttgcctggcgccgccgcgccgacatgggtaaacatcgccagtgaaatatcaaaatggttattcgaatggcagccccaggttagcccccagtcatcacacagttgcgccacgcgaacggcgccggtgagggtccagaaatgcggatcggcaagaggaatgtctaccgcgttgagcatcaccgcgtgtcccatttcacgccagttggtggcaatcatattggtcgctaccggcagtcctgtcgcgcggcggaactccgccatgacttcacgaccagagaatccttgctccgcgccgcacggatcttccgcgtaggtcagtacatcattcagccctttgcacaacgcaatggcttcatccagtagccaggcgccgttcggatccacggtaatacgcgcgtccgggaagcgtttttttagcgcgcgaacagtatcaatctcttgttcgcccggcagcacgccgcccttgagtttaaaatctttaaagccgtagcgatcctgagacgcttccgccagccgcacgaccgcgtcgctgtccagcgcttcctgatgacgcaggcgataccattcatgactgcccggcgtgctttccagatacggcagatcggttttagtgcgatcgccaatatagaagagatagcccaacacggtgacggcatcgcgctgtttaccgggtcctaacagttcacagaccggcacattaagcgcctgccccagtagatcaagcagcgccgcttccaaagctgccaccgcgttaacccgcagttcaaacgtccatgcgcctttaccaaaggtgtcaaaatcagcagcctggttgcctttatgcacctgctgcaccactttgttcaggcgggcgacttcctggcctaataccatcggaatagcatcgaccagcgtctgataaatcacttctccgcccggcgcctcgccgacgccagtatgcccggcgttatcggtgaggatgacgatgttacgggtgaagtacgcgttatgcgcgccgccgatgttgagtagcatactgtcatgtccggcaaccggaatgaccttcatgtccgtaataacgggactggattgcgttgtcatgataattgtcctgcgacaggtttcagttcaatacgcttaatatcgcctaccagcaccagatagctgatgatggccaccagggcatgtacgccgacatagatcaacgcgccgttgaaggaaccggtggtgccaacgatgtaaccaatcgcgattggcgtcacaataccggaaatattgccgaacatattaaacaagccgccggaaagaccgctgatctctttcggcgcggtatccgccattactgcccagcccaacgcgccgatacctttaccgaagaaggccaacgccataaagccgatgatcatccattccacgttcacatagttacagaacaccatgaccattgacagcaacatccccagcacaatcggcgtcttgcgcgcgatattcagggagccggtacgacgcatcagccagtcggaaatgatgccgcccaacacgccgccgataaagccgcagaccgcaggaaccgaggcgacaaagcccgctttgagaatcgacatgccgcgcgcctggaccaaatagaccgggaaccaggtaataaagaaataggtcaatgcgttaatacagtactgaccgatgtaaacgccaatcatcatacgagagcccagcagctgtttgatctggccccatttgacgctaaacggtactttcgctttggtgtctttctgatccatattgatcagcgcgccgccttctgcgatgtactccaactctttcttatttacgcccggatggttatttggttcatggataactttcaaccagataaagctgatgatgatccctaacccgcccataaagaagaagacatgcgaccagcccacttcgtgcgtcagccagcccataatcggcgcgaaaataaccgtggcaaagtattgcgcggagttaaagatggccaccgccgttcccctctcctgcgccgggaaccaggctgcaacaatgcgactgttgcccgggaaagaaggcgattccgccagaccaaccaggaaacgaagcgtaaagagggcgacaataatgccgaaaccactaaagatatcgacaaaaccctgcaacagggtgaagactgaccaaatgaaaatagaccagaaatagacgcgtttggaaccaaagcggtccagcagccagccgcccgggatctgcccgataacataggcccatgaaaaagcagaaaaaacatagcccatgcctaccggatcaaggccgatatctttggccatttctgagccggcaatggacaatgtggcgcggtcgccgtagttgaaggatgtgacgataaacagcatcaccactatccagtagcgggcgttcgtgcgtttctccgcactgctcgccgcgtgacttaatgaactcattgttgcactcctgaaatttcgcgttagctacgctcactctgaactgcacaaccggtagggaatcagagataacgtttccttgttgcagcttttattaggtcgtttgctttgcacgctgcatgcttttattcactggcaggagaagtataaaaagcgcgccacacacactcaccgtgcaacaacacagtattttggcgatgaattacgcctgtttatggcaaaagcccaggacagtggaagccacttcacggaaatgaaatcagaaggcgtcggcgtcgacgcaggaggagtaaaaagagaagaatgtgaaacaggtcgcttgattacatgaaaacgcccgtaaaaaactgctgcttttgcgggcatatgcacaaagctaacacgattcagttactttacactgtgtacaggtcatgattttgcttactggcaacgcaagcaaacgaaaaggtaccctcccgtaggggggagggatttacctcaggaaagtaaagttccccagttttcaacccagggattggactggctctccggctccggatgttcgctggcgtcaatgaataacatctcccccacccgctgcgcgctttgctcttgcaacagggcatcaaactgtttgccgccattacagaaattggggtagctgctatcacctaacgcaatcaccccgtaacgcaggtttggttgaaaaccgactgtatctttaatgccgtgaaagagcggcgcaatgctatccggtagatcgccctgcccggtcgtcgaggtaacgaccagcgcaaccttatcctgatattgctgccagtcggacagttcaggatcttcaaacacggtcgcgctgtggccctgtctggcgaggatcgcttccgcttcttccgccaccagcagtgagttgccatacatggtcccgacaaaaataccaatttccgccattatgcgtatctccctgaattatgtcagatgagtctcatcctgccgggacgccgccgtaaactcaaccctttcattgtcagggagaagtccacgccagccaaactgcgtcagcgcctgcatccaggtttcatccaacccggcctgaattatcaacggctgtccggtgaaggggtgcgtcagttcaagacgactggcatgaagcatcaggcgacgacaggcaaaatgctctgcggcgctgcggttttgtcgcaaatcgccatgtttactgtcgccgatgataggatgacgcagatgcgccagatgacgacgaagctggtgcttgcgtcccgtttttggttccagctcaaccaggccataacgcgtggtgggataacgcccggtcggcaccgccatttcgaccgtcgccagcccgcgatactgcgttacggccggctggggcgctttatcttcgcgggcgaatttatcggcaattttatcgcgctcttccaccagcggataatccagtaccgcgtcatccatcagccagccgcgcacaatggcatggtagcgtttacggatgtggtgctgctcgaactgctgcgccagacggcgtcccgcttcgctggacagccccattaacagtacgcccgacgtgggcctgtcgagacggtgggcggtaaaaacatgctggccgatttggtcgcgcaccgtttgcatgaccacgactttttcgtcgcgatccagccagctccggtgaacaagccagcctgcgggtttattcacggcaaccagccacgggtcttgatagaggatctccagcatcaggatttatcgcgggcgaatagcgcatccagatcctgcaaaaccgccaggatcgtctcccgctgcggatgatccgccgccagcgccatttcataataaggggcgacggcaaacgcctcgggcagcggctgcgcattatcaagtagggtatgcatacgtgggatcaatacccattgcagccattccagcggctccatggtatccataaaaaatggttgggtgctggtaaacaggtgcgcctgcggcgcatcctgccgccagtggcgatgctcgcgcagcagcgtttcaagcgtatgtaactgctgacgcacacggtcatgagtcgtcatgttaaaaacctcaatgatgaaaatctggcgcgaagaataacaaaaaaaagggagcactgtataaacagtgctcccggttcgtttcgcagcattccagctacttttcgtgctccctgctcatccgtgacaacttttcctgtgaccttacggcctgttcatcctgaacgtttgcatcctgcgcacatcgcccgatgtgatagcttcttcctgaagcgtccctggtcatccagacccgccgaacatcctgatcggctctcgttctccgtcctggaggtgtcctttaacgcatcctgcgctttccactttgcttcatcctgaagcctttccttgtaacaccatcctggcgtgtcctgctgaagcgtcatcatcctgacgttcgcttcgttgtacgactccctgtcgacgaagatagaatcgcctgtttcaccttgtcttacaagacgcttacagacaataccttaagtaaattttcatatgaaagtgcgcaaaaacattttaattagttgttttatatagacttacataagaaaacggggctcagtatccgctgatatcctggcgatctcctacagactttgtaagagatctctcacacctgttagggcaaacgattacagaagaggattaagttgcgtaaggaattccgcaagcgttgcggcaagaacggtacgattgcgggtgcccagcgtttctttaatcacctcgccggacagattacagaccgaaatgacctcaagctcattttcctgcgtcgcaataaaaagcgtgggaggaagcttgagccgcttttgcgtgaccaggtggcctatcagattttcctgcacgcgccgaaagtcatcctgactccaggtttgcagtagcgtaagcttttcatccgcaaactgcgcgggcatgtcgccagcaaactgcgtggtgtaaaacgcgtggagcgcaggttgtaccataatatcaaaggcgcgttcaaccgcgtttacattttcttcgccttcaaaaggttgcggctgccagtaaacggcatcgcgggttgaagaaataatgcacggagaaggtacgccatacagttcttcgctcaacggccagctaccgtgtttttcttgccacgcatcgcagtaacgcgtcgtaaaggctttcaatgcctgcgctgtcagttcgtccaccagtttctctcttcataaaagccaggatacacttggcgcatagtgtatctggtttatgacggtgaaacatgtcttcttatgaaaaccatcaggctcttgatggcctgactctcggaaaatcaacggattaccgggacaattatgacgtcagcctgctgcagggcgtaccgcgcagtttgaatcgtgacccgctcggattaacagccgataatttgccgttccacggcgcggatatctggacgttgtatgaactttcctggcttaacagccagggtcttccgcaggtcgccgtcgggcatgtcgaactggattacaccagcgttaatttaatcgaatccaaaagctttaaactgtatctgaacagctttaaccagacgcgctttgacacctgggagacggttcgccagacgctggagcgcgatctgcgcgcctgcgcgcagggcaacgttagcgtgaggcttcatcgtcttgatgagctggaaggacagcctgtcgcccatttccacggcacctgtattgacgatcaggatatcagtatcgacaactaccagtttactaccgactatctgcaacatgcggtcagcggcgagaagcaagtagaggagacgctggtcagtcatctgttgaaatccaactgcctgatcacccaccagccggactggggctcgatacaaattcagtatcgcgggcgcaaaatcgacagggaaaaactgctgcgttatctggtctccttccgtcaccataatgaatttcacgaacagtgcgtagagcgtattttcaatgacattctgcgcttctgccagccggaaacgctaagcgtttatgcgcgctatacccgccgcggcgggctggacattaatccctggcgcagcaataccgatttcgtgcccgccacgggcaggctggcgcgacagtaatttttttgtcaattttgcgtgccggattgcgcatgtaaggttgtgaaaggtcatcagccagggctattgtaatcaacagggaatggcgtgttgcgtcccataaggagtttacttgattacacatattagcccgcttggctcaatggatatgttgtcgcaactggaagtggacatgctgaaacgcacggccagtagcgacctgtatcaactgtttcgtaactgttcacttgccgttcttaactccggcagcctgaccgacaacagcaaagagctgctgtcccgctttgaaaatttcgatattaacgtactgcgccgcgagcgcggcgtgaagctggaattgattaacccgcctgaagacgcttttgttgacgggcggattattcgtgcgctacaggctaacctgttcgcggtgctgcgcgacattctctttgtgaatgggcagatccacaatgccggccgtttccagcatctggatcttgaaagctcaacacatatcaccaatctggtgttctccattttgcgcaacgcccgggcgctgcacgtcggcgaagcgccaaacatggtggtatgctggggcggccactcaattaacgaaaacgagtacctgtatgcccgtcgcgtcggcacgcagttgggattacgcgagctgaacatctgcaccggctgcggccctggggcgatggaagcccccatgaagggcgcggcggtcggtcacgcacagcagcgctataaagacagccgctttatcggcatgactgaaccttccattattgcggctgaaccgcctaacccgctggtgaacgaactgatcatcatgccggatatcgaaaaacgcctggaagcgttcgtccgtatcgcacacggtatcatcatcttcccgggcggcgtgggtacggcggaagagctgctttatttgctggggattctgatgaatccagccaataaaaatcaggtgctgccgctgatcctgaccggaccaaaagagagcgccgattacttccgcgtgctggatgagtttattacccatacgctgggcgaagcggcccgccgtcattaccgcatcatcattgacgatgcggcggaggtagcgcggctgatgaagaaagcgatgccgcaagtgaaagagaatcgccgcgatactggcgacgcctatagttttaactggtcgatgcgtattgcaccggatctgcaggtgccgtttgagccgtcgcatgagaatatggccaacctgaaactgtacccggatcagccggttgagattctggcggcggatctgcggcgcgccttctccggtattgtcgcggggaacgtgaaggaggtcgggatacgcgccattgaagctaatggtccgtataaaatccacggcgatcgagagatgatgcgtcgcatggacgatctgctgcagggattcgtcgcgcagcatcgtatgaaattgccgggttccgcctacatcccctgttacgagatctgcgcttaacgcttatgcccggttgccgccagcagccgggcgcttctcccattcctttcattgcggtatggcgattcacgtatgccttcattttttatgatgatcatcagaggcatagcccgcattgttttataaacaccatttataattcaccataaatagattgccaggcaaacgtttacctgactcctcttaccgtgatttatcggttcaaactctcattcttcgcaagaatccactaaaaaccttgatttttatagtcaaacctccgtatcttgcgccccaatctttccggccttatatcgttaatggtagccttcgcgcccggaaattcgttatgacgtttttttaatagattaatggtccaaatttatccatgtaagaagcggattattgcatttgagatcgggatcactgatagattcatcacttaaatgtatctttccgcccgaaaattattacggcgaaaaattatataaaaagcgtccctaagcagatttcattttacgatcaggtcttttttcattggattagaccagcaacctgatttttagcatcctccaggagaaatagatggaaaccactcagaccagcactattgcttcgattgactctcgaagcgcatggcgcaaaacggataccatgtggatgctgggcctttacggcacggctatcggcgcgggcgttctgttcctgccgatcaacgcaggcgtcggcggcatgattccgctcatcatcatggcgattctcgctttcccgatgacctttttcgcacaccgtggtttaacccgcttcgtgctgtccggtaaaaatccgggtgaagacatcactgaagtcgttgaggaacacttcggtatcggcgcaggtaaactgattaccctgctttacttcttcgcgatttaccccatcctgctggtttacagcgtggcgattactaataccgtggaaagcttcctgacccaccagttagcgattaatccgccgccgcgggcgattctttccctgatcctgattgttggcatgatgaccatcgtgcgcttcggcgagcaaatgatcgttaaggcgatgagtatcctggtattcccgttcgtcgctgcgctgatgctgctggccttgtacctgatcccgcagtggaacggcgcggcgctggaaactctgtcctttgattccgccgcgtctaccggtaacggtctgtggatgacgctgtggctggcgattccggtgatggttttctctttcaaccactccccgatcatctcctccttcgcggttgcgaagcgtgaagagtacggtgaaggcgctgagaagaaatgttctaaaattctggccttcgcccacatcatgatggtgctgaccgtgatgttcttcgtcttcagctgcgtgctgagcctgacgccggcagatctggcagcggcaaaagagcagaacatctctattctgtcttacctggcgaaccattttaacgcgccgatcatcgcctggatggcgccgatcattgcgatgattgctatcaccaaatccttcctcggccactaccttggcgcgcgtgaaggctttaacgggatggtgattaaatcgctgcgtggtaaaggtaaatccatcgaaatcaacaaactgaataaaattaccgcgctgttcatgctggtcaccacctggattgtggcgacgctgaaccccagcatcctgggcatgattgaaaccctgggcggcccgatcatcgcgatgattctgttcctgatgccgatgtatgccatccagaaagtaccggcaatgcgtaagtacagcggtcatatcagcaacgtattcgttgtgattatgggcctgattgccatctccgctattttctactcactgttcagctaagtcctttagcgccgcttaccgcggcgcttctctatgatacaaccgcaatggatgccctatgattagcgtattcgatatttttaaaatcggcattggcccttccagttctcacaccgtcggaccaatgaaagcaggcaagcagttcacggacgatctgattgcccgccatattcttacagatgtcacccgcgtcgtggtggatgtctacggctctctgtcattgacgggtaaaggccaccacactgatatcgccattattatgggcctggcggggaatctgccggacaccgtcgatatcgacgccattccgtcctttatccaggatgtgaacacccatgggcgtttactactggctaatgggcagcatgaagtcgaatttccggtcgataagtgcatgaatttccacgccgacaacctgtctctgcatgagaacgggatgcgtattaccgcgctggcgggcgataaggtgctctacagccaaacctactactccatcggcggcggctttatcgtcgatgaagagcactttggtttgacgaatagcgaacccgttaacgtaccgtacccttacaaaaccgccgcggatttacagcgccactgccaggagacgggtttgtcgctctccggtctgatgatgcaaaacgaactggctctgcacagtaaagaagcgctggagcagcacttcgccagggtctgggaggtgatgcgcagcggtattgagcgcggtatcaccaccgagggcgtattgccgggcaaactgcgcgttccgcgtcgcgcggcggcgctgcgtcggatgctggtcagtcaggataagaccaccaccgatccgatggcggtcgtcgactggatcaatatgttcgcgctagcagtgaacgaagagaatgccgcaggcggacgagtagtcactgccccgactaacggcgcatgtggtattgttccggcggtgctggcgtactatgacaagtttatccgcgaagtaaatgctaactcgcttgctcgctatatgctggtcgccagcgcgattggctcgctgtataagatgaacgcctctatttccggcgccgaagtgggttgtcagggagaggtcggcgtggcctgttccatggcggcagcgggtctggccgagctgctgggcggtagcccggcgcaggtgtgcatcgccgcagaaatcgccatggagcataatctggggttaacttgcgatccggttgccggtcaggtacaggttccctgcattgagcgtaacgcaattgcttcagtcaaagcggtcaacgccgcgcgtatggcgctgcgccgtaccagcgaaccgcgcgtatgcctcgataaagtgattgagaccatgtacgaaaccggtaaagacatgaacgctaagtaccgcgaaacttcgcgcggcggcctggcgatgaagatcgttacctgcgattaattctcagcacattttaggatctgtaagccggataaggcgctcgccgccatccggcttttgttgcctgatgtcgcttcgcttatcaggcctacggatagcgctatttcgcaatgctcgcctccccccgccgtgaatgttaccctacgcgcaggtttgtaagggagaacaccgtggctgctcatctgcttatcgtcgacgcgctcaatttgattcgccgtattcacgccgttcagggatcgccctgtgtggaaacctgccaacacgcgctcgatcaattgattattcacagccagccaacccatgccgtagcggtatttgatgacgacgcgcgcagcagcggctggcgtcatcagcgtttgccggactacaaagcaggacgtccgccgatgcctgacgatttacataatgaaatgcccgccctacgcgccgcatttgaacagcgcggcgtacgctgttgggcatcagacggtaacgaagcggacgatctggcggcgacgctggcgctaaaagttaccgaagccggacaccaggcaaccattgtgtcaaccgataaaggctattgccagttgctctctccgggattgcgcattcgcgactacttccagaaacgctggctggacgcgccgtttattgaaaaagagtttggcgtacttccccggcagttgccggattactggggtctggcaggaatcagtagttcgaaagttcccggcgttgccggtatcggccccaaaagcgcgacccagctattgattcagtttcaaaatctggagggaatttacgcccatctggacgaggtgccggaaaagtggcgcaaaaagcttgagacgcataaagaaatggcatttctttgccgcgatattgcacgtctgcaaaccgatttacatatcgacggaaacttacagcagctacggctggcgcggtagttttgttgccggatggcggcgtgaacgccttatcctgcctacaggactgcacgaaatgtagagcggataagcgcagcgccatccggcaaaattaccaggcggtatgatacagttcgacaatgtccgccagactcgcttcacgcggattgccgcccgtacagacatcatcgaacgccgcctgcgccagcgccgggatatcctcttttcgaacgccgacatcacgcaaatgcagcggaattcccacatcgcgatttagcgtaaatacggcttccactgcggcattacgcgcctcttcaaggctcaatccttctaccttcacccccatcgcccgggcgatatcacggaatttctcgttggtagacccggcattgaaacgcatcacatgcggaagcaaaatagcattcgcgacgccgtgtggcgtgttgtaaaacgcgcccaacggatgcgccatcccatgcaccagccccagccccacattggaaaaccccatcccggcaacgtattgccccagcgccatcgcctcaccggcctctttttctccggctacggcgccgcgcagcgcgccagcaataatctcaatggctttgatatgtaatgcatccgtcagcgcccatgcggcccgggtaatatagccttcaatagcatgggttagcgcatccacgcccgttgccgctttcagcgcgggcggcataccgtccatcatatcggcatcgataaatgccgcctgcggaatatcatgcggatcgacacaaacgaatttgcgccgtttctcttcatcggtaatcacataattgatagtgacttccgccgcggttcccgccgttgtcgggatcgccataatcggcacgctgggtttacgggtcggcgatagcccttccagactgcgcacatcggcaaattccggattgttactgataataccgatcgctttgcaggtatcctgcggagaaccgccgccaatggcgatgagatagtccgcgccgctttgggtaaagaccttaagcccttcctggacaacggaaatcgtaggattagggatcacgcccgcatagatctcccacgccagccctgcggcatccattctgcttgtcactttatcgaccacaccgcattgcaccagcgttttatcggtaacaatcagcgctttatgataaccgcggcgcgtcacctcatcggttaatgcgtccaccgctccccggccaaaccatgccgtttcattcagaatcattctgttcgccatcgcctgtctcctgacatcactcttcaatacgtaatccgtaagttttaaatttctccagtacgatagcgatcgcctcgtcatccagtaccggtaccggatcgacaatggccagcgtacttaaatagagctgcgccagcacttccacttcatgcgccagccacaacgctttgtctaaattttcttcacaagcgataagcccgtgatgctgtaacagcgtcgctttacgatttttaagcgccacggcaacatggtcagaaagttcgcgggtgccaaaagtggcgtagggcgcgcagggaatagagtttcctcctgcggcggcaatcatgtagtgaatcgccggaatcgggcgattcaggatcgagactgccgtacaatggacagcgtggttatgtaccacggcattggcgtcagggcgcgtctggtatgccgccatatgaaaacgccactcgctggaaggcagcttgccctgctcatgctgaccgtcagcatcaataaagacaatgtgcgactctgtcagcttctcgtaggggatccccgtcggcgtaatcagcaatccgccctgataacgtacgctcacgttacctgccgtcccctgatttaaccctaaccgcgtcatttccagacaggtatcaataatctgccgcgccagtctatttcgttccattatttacctctctctgtgattcaaaatgagacaacaaaaccgcctttcgcattgcgctgctgtcctgttgaaataatcgaatagttagcaactatcatcatactgaataaagagaagggaatttaaataacgatattttgtgattcacatcaattaattcgccacgataaaccagacgactaccgtttctctcgccgataaatgcccgctcttaataatattttttaaaacgggcaaagatgaagaataagttactactgcccgttttcgtggcaataatttaattcgggcattcagcctgtggttttttaaattaaacatctcaaacggtcattttttatgaaaattaaagtgatgataatcacagaacgctatgctctcaggtataaatgtgaccgccatcatattaaaaggccttttttatttgaaaatgactccatgagttcattccggacgccaatttattaccggtaagaaaagcgaactcacctaattttacggtctggtgaccagaaccgaccgcacgcaaaagcttctgaaccgatgaggatgctatgggaaacacaacaatacaaacacagagttttcgtgctgtggatgcagagcaaagcaaaagcaagcgctacattattccattcgccttactttgctcgctattttttctgtgggccgtcgccaataatctgaatgacattttattaccgcagtttcaacaagcttttacgctaactaactttcaggccgggcttattcagtcagccttttatttcggttatttcgtcattccaattcccgctgggattttgatgaaaaaactcagttataaagcagggattatcaccggactttttttgtatgctgttggcgccgcattattctggcctgccgccgagataatgaattacacattgtttttaattggcctgtttatcatcgccgccggtttaggctgccttgaaactgcggccaacccttttgttacggtattaggtccagaaagcggcggacatttccggcttaatctggcgcaaacttttaactcctttggcgctattatcgccgttgtgtttgggcaaagccttattttgtctaacgtgccgcatcaatcgcaagaagcgcttgataaaatgacgccggatcagcttagcgcctataaacacagcctggtgttatcggtacaaacgccatacatgattatcgtcgccatcgtattagtagttgcgctactgattatgctgaccaaatttccggccctgcaaagtgacgatcatagcgatgctaaacaaagctctttcttatcttctctctcccgactcatccgtatccgccactggcgctgggcggtgctggcgcagttctgctacgtgggggcgcaaaccgcctgctggagctatctgatccgctacgccattgaggagatccctggaatgacgcccggtttcgccgccaattacctgaccggcacgatggtgtgcttctttatcggccgtttcaccgggacctggcttatcagccgcttcgcgccgcataaagtgctggccgcctacgccctgtttgccatgctcctgtgtctgatttccgcctttagcggcggacatatcggcctgctggcgctgacgttgtgtagcgcatttatgtcaatccagtacccgaccatcttctcgctgggtatcaaaaatctgggacaggacactaagtacggctcgtcttttatcgtcatgaccatcattggcggcggtattgtcacgccagtaatgggcttcgttagcgacgccgcaggcaaaatcccgaccgccgaactggttccggcattgtgctttgccgtcatcttcatttttgcccgtttccgttcacaagcggcgacaaactgaacatttatccgaataacgtgaggaatctgtcatgaaaaaaatcagcttaccgaaaatcggtatccgcccggtgattgatggacgtcgtatgggcgtacgcgagtcgctcgaagagcaaaccatgaacatggcgaaagcgacggcggcgctcatcaccgagaaaatccgccacgcctgcggggctcaggtggagtgcgtcattgcggatacctgtattgccggaatggcggaatccgccgcctgtgaagaaaaattcagtagccagaacgtgggcgtgaccattaccgttacgccgtgctggtgctatggcagcgaaaccattgatatggacccgatgcgtccgaaagccatctggggctttaacggcacagagcgtcctggggcggtttaccttgccgcggcgctggcggcgcacagccagaaaggcattccagcgttctccatttatggccatgacgtgcaggatgccgacgatacctccattcctgccgacgtcgaagaaaaactgctgcgttttgcgcgggcagggttagcggtagccagcatgaaaggcaaaagctacctctccgtcggcggcgtgtcgatggggatcgcgggttccattgtcgatcataacttctttgaatcctggctgggcatgaaggtgcaagcggtagatatgaccgaactgcgccgccgtatcgatcaaaaaatttatgatgaggccgaactggagatggcgctggcgtgggcggataaaaacttccgctacggcgaagatcagaacgcctcgcagtataagcgcaatgaagcccagaaccgcgcggtgttaaaagagagcctgctgatggcgatgtgtattcgcgacatgatgcagggcaacaagacgctggcggacaaagggttagttgaagaatcgctgggctacaacgccattgccgccggcttccagggccagcgccactggaccgatcaatacccgaatggcgataccgccgaagcgctgctcaatagttcttttgactggaacggcgtacgcgaaccgtttgtcgtcgccaccgaaaatgacagtctgaacggcgtagcgatgctgttcggccatcaactcaccggtaccgcgcagatattcgccgacgtgcgaacctactggtcgccggaagccgtagaacgcgtcaccggccaggcactcagcggcctggcggaacacggcattattcacctgattaattccggttctgccgctctggacggtgcctgtaaacagcgcgacagcgaaggcaagccgaccatgaaaccgcactgggaaatcagccaacaagaggcggatgcgtgtctggcggccaccgaatggtgcccggcgattcacgaatacttccgcggcggcggctactcatcccgtttcctgaccgaaggcggcgtaccattcaccatgacccgcgtgaatatcatcaaaggcctggggccagtactgcaaatcgccgagggctggagcgtcgaactgccgaaagcgatgcacgatcagcttgatgcccgcaccaactctacctggcctactacctggtttgcgccgcgtcttaccggcaaaggcccgtttaccgatgtctattcggtgatggcgaactggggcgctaaccacggcgtactcaccatcggccatgtaggggcggactttattactctcgccgcgatgctgcgtatcccggtatgtatgcacaacgtggaggaggcgaagatctaccgtccttccgcctgggcggctcacggtatggatatcgaaggccaggattatcgcgcctgccagaattatggcccgctgtataaacgttaatgcggcttaggccggtggcgcaggtttaccgggactacgggcgcgtgaaccgtaggccggataagcgtagcgccatcgggcggcgtttatggagttatctatgaaacaagacgttatcctggttctcgactgcggtgcgacaaacgttcgggcgatcgccgttgatcgccaggggaaaattgtcgcccgcgcctcaaccgctaacgccagcgacattgccgcagaaaatagcgcctggcatcagtggtcgctggacgccatcctgcaacgtttcgccgattgttgcaggtcactctccagcgccctgtcggagtgtgttgttcgcggtattacggtgactacgttcggcgtcgatggcgcgctggtcgatgcgcagggcaagctgctctacccggtcatcagttggaaatgcccgcgaaccgctgccgtgatggaaacgattgagcgctttatctcgccccggcaattgcagacgctctccggcgtcggcgcgttcagctttaacacgctgtataaactggtctggcttaaagagaatcatccgcgcctgctggaacaagctcactgctggctgtttatctcgtcgctgattaaccaccgtctgaccggcgagtttacgaccgatatcactatggcaggcaccagccagctcctggatatccatcagcgcgactttagtccggaaatcctgcaggcgacgggcctggcgcgccgcctgttcccgcgtatcgtggaagcgggcgccccgataggcacgctacagacagacgcggccaggctactcggtctcccggcgggtgtgccggtgatctctgccggacacgatactcagttcgcgttattcggcgctggcgcgcagcaaggtgaaccggtgctctcctccggaacatgggagattctgatggtgcgcagcggtcaagtggatacctcgctgctcagtcagtatccgggctcgacctgtgaactggacagtcagtcggggctttataaccccggaatgcagtggctggcctccggtgtactcgaatgggtacgaaaactgctgtggacgccggaaacgccatggcaaacgctgatcgacgaagcgcgcgctattcccgctggcgcggaaggcgtacggatgcagtgcgatctgctcgcctgccaaaatgcaggctggcagggcgtgacgctcaataccacccgcggccatttctatcgcgccgcgctggaaggcctgacggcgcaacttcagcgtaatctgcgcacgctggagaaaatcggccattttaacgccacagaactgttactggttggcggcggcagtcgcaacgctttatggaatcaaattaaagcgaatcagcttgatatccctatcaaagtgctggacgacgcggaaaccaccgtggccggcgctgccatgtttggctggtacggcgtaggcgaatttagtagcccggaacaggcgcgcgcgcaggtcaattatcagtatcgttatttctggccgcaaaccgaacctgaaattattgagggagtatgaaatgctaaaaaccatttcaccgttaatttccccgacactgctcaaagtgctggccgagatgggccacggggacgaaatcattttttccgacgctcactttcccgcgcatagcctgggcccgcaggtgattcgcgccgatggtcttagcgtcagcgatctactgcgggcaattattccgctctttgagctggatagctacgccccgccgctggtgatgatggccgccgtggaaggcgacacgctcgatcccaacgttgaagcgcgctatcgcgatgccttgtcattagaagcgccgtgcccggatatcgttcgtatcgaccgctatgcgttttatgagcgggcgcaaaaagcgtttgcgatcgttatcacaggtgagtgcgcgaagtacggaaatattcttttaaaaaaaggggtaacgccgtaatctcttgccggtgcgcccgcatgacgcgggcgttcatcgaatgatggggtgagaaaaatgaaagcggcacgccaacaagcgatagtcgatctgctgatcaatcataaaagtctgaccaccgaagcgctggccacccggcttaacgtcagtaaagagaccatccgccgcgatctcagtgaactacagacgcagggaaaagtgctgcgtaatcacggacgagctaaatatattcatcgtgaaaatcaggacagcggcgatccattccatatccgcctgaaaagccattatgcgcacaaagccgatattgcccgtgaagcgttagcgtggatagaagaaggaatgacgattgcgctggatgccagttcaacctgctggtatctggcccgccagttgccggatattcccattcaggtttttaccaatagccatcctatctgtcaggagctgggaaaacgcgaacgcattgcgctgataagttccggcggccagcttgaacgtaaatatggctgttatgttaatccgtcgcttatctcacagctaaaatcgcttgatatcgatctgttcatcttttcctgtgaggggatcgacggcggcggcgatctgtgggactccaatgcgatcaacgccgattttaaatctatcctgctcaggcgcgcctcgcagtctttattattgattgataaaagtaaatttaatcgttcaggagaggcgcgcatcggccatctggatgacgtgacgcatattgtttcagatgcgccgcaatcgtagaccggataagcgtgcgtcatccggcgctgatgacgcgccggacgacggcaacgcgtttttatcgctcgtcgcgacgtccgccaacagccgcccacaaccgacgcacgtgtaccgtcacttcttcgcgatcgtgataaagctgacgcgcctggatctgcgcattaacgccgtgctcatccaactgcgcctgaagatacgccaggttatgcgacacctcttcatagcgttttttcatcggcagtttaaggttaaaaatcgtctcccgacaccagccgttcaccagccactgcgccattaacgcggtgactttggccggcttctccaccatatcgcagaccatccatgaaatattattccggttcggacggtacctgaagccatcctcacgcaaccaggtcacctgtccggtgtccatcaggctttgcgccatcgggccgttatctacggagtagacccacatattgcgcttcactaactggtacgtccatccgccgggacaggcgcccaaatccaccgcatacatgccgttcgccagacgttcatcccactcatcttccgggatgaaaacgtggagcgcctcttccagtttcagcgttgagcgactcggcgcatcagacggaaacttcaaacgcgggatgcccatataaaacggtgaattgttatgcgcgaacgaataaccggtatagcagcatcctggcgcgataaaaaagacatgaacgaccggacgcttcggcgtttcataattcgtcaatacgcccgcatcacgcaaagccgcgcgcagcggcaccgtaaatttgcggcagaacttcatcagttctttactttcattggtgtcggcgacttcaactcgcagctcgccgcccttttccactacgccctgcaacatgccgacaatcggcgtaattctgtcttccggcggtaaatgttgcagcagttcacccaccacaaaccactggcgggcgaaaatcagcgaactgaacggcagttctgaaatcagcttttcgccatcttccggctggtagcattcataaatgacatagcctgcgttctcttttacgcgtgcaaaaccaaatatttcccgttttcccgctttatcggtaatttctgcagcgcactctttttcaaaccccggacggcagagcaatacaactttattcatggctcgcgcccttacgtttcatacgaatggcgccaatcagcaatagcgcccagcccaccaggaaactgacgccgccgacaggcgtgatatacgcccacaggcgcagatgcgaaagcgcaaggcagtacaggctgccgctaaacagcaccgtgcccagcgccagaaaaacgctgctccagtaaaaccagatgctgatacggcgctgcatcgccaccgccaggccaaagatcgccagcgtatggaacgcctgatattgcaggccggtctgaatccagcccatttcaaccacgcccagggttttactcaaaacatgcgccccgaacgcgcccagagcaacgtaaataaaaccgctgatagcggcgacaatcagcataaaacggctggtcatggtcataccctaagttaattattgttcgtaacgaaaacggaatttttcttgctccgtcgccgccttcgccaaaatccactgacggaaggcggctattttacccagttctgcctggctgtcatgacaaaccagataaaaagcattcttactcaccagaacatcgttaaatggacacaccagtcgcccggcttcaatttccgactgcgccataacattattcgccagcgcgatcccctgtccgtgaatagcggcctgtagcaccatcgcgctgtggctaaatatcggcccttgctgaacgttaatatggttgagccctaactgacgagtataggcctgccagtcacgccgggaggcgtcgtgcaatagcgtgtgtttcgccagatcttccggcgtttttaacggtttttcgcctgtgagtaataaaggagaacagacgggcagtaaatattctgcgtataatttttcgacgcgcaagcccggccagtttccccggccataaaaaatcgcgacatcgacatcgtctgccagtttatcttcctgacggtcaacggcttgtatccgaacgtcaattcccggataagctgagttaaagctggagagcctgggcaccagccactggatggcaaaactgggcggtaaactcaccgtcagcgcccctttggcactgcgcgcctggagcttacgcgttgcttccgtgagctgggaaaatatctctttaatgtcgagaaaatagctttggccttcttccgtcagcagcagcgaacgattgcggcggcggaacagttttagccccaaaaaatcctcaagtgacttaatttggtggcttactgcggcctgcgtcacaaaaagttcttccgctgctcgcgtaaagctcaaatgacgcgcggcagcatcaaaaacgcgtaacgcatttaaaggaggtaatcgttttgacatggcctctggacttaatgtcgaatgaatttaacaaataggtaacaacatgtaacctattagtttttttaatctgagacattataaattgtccgttgaggttctaccagcaaatacctatagtggcggcacttcctgagccggaacgaaaagttttatcggaatgcgtgttctgatgggcttttggcttacggttgtgatgttgtgttgttgtgtttgcaattggtctgcgattcagaccacggtagcgagactaccctttttcacttcctgtacatttaccctgtctgtccatagtgattaatgtagcaccgccatattgcggtgcttttttttgtataacaaacggttagttttccagagccaccatctctttcacgtcagtacgattgatctgctgtttgttgccattagcgtctttatacgaaatcataccggtatcgttatcggtctggggtttaccgtcggtcacaatgctacgtccatcattggtgtgcataacgtaattaggaccggaacaggcgctcagggcaaaagtcagcatacatgcagagataattgcggcagtctttttcatcttcttctccttaaagctgtttgtgctatttaaagcggactccgtaacaggcttaaacattcgcctaacattattcagcataacctcctttacataattcgccaggatatacagacgattccgatggttaggacaaaccttgtatcagccgcgcttttacgccacgatcggtaaactgaaccgaggaatatcatgaacgcttttaatcccacgcagtttcgcgcgcagtttcccgcgctagccgatgcgggtgtttatctcgatagcgccgccacggcattaaagccacaggcagtcattgacgccacgcaccagttttattgtttgagcgccggtaacgttcatcgtagccagtttgcgcaggcgcagcgcctgacggcgcaatatgaagcggccagagcaaaagcagcgcggctgttaaacgcgcccgatgaaaaaagtatcgtctggacacgcggcaccaccgaagcgatcaacatggtggcgcagtgttacgcccgtcctcgtctgcgccccggcgatgaaattatcgttagcgtcgccgagcatcacgccaaccttgtgccctggctgatggtggcgcaacaaaccggcgcgcaggtcataaaactgccgcttaatgaccggcgtcttcctgatgttgagcgtctgccggaactgatcacgtcgcgcagccggattctggcgctggggcaaatgtcgaacgtaacgggcggctgcccggatctcgcaagcgctatcagcgccgctcacgcagcgggaatggtcgtgatggtagatggcgcgcaaggcgcggtacacttcccggcggatgttcagcagcttgatatcgatttttatgctttttccgctcacaaactgtatggcccgaccggtatcggcgtgctgtacggtaagccggagcttcttgaggcgatgtcgccctggctcggcggcggcaagatgatccgtgacgttagctttgaaggcttcaccactcaaagcgctccctggaaactggaagcggggacgccgaacgtcgccggggtcatcggcctgagcgctgcgctggaatggctgtccgatatcgatattgaacaggccgaaaactggagccgcgggctggcgacgctggcggaagacgcactggcgaaacgcccgggctttcgttcgttccgctgccaggactccagcctgctggcctttgattttgtcggcgtgcaccacggcgatatggtgacgctgctggcggaatacggtattgcgctccgggccgggcaacattgcgcccagccattgctggcggaacttggcgtcacagggactctgcgcgcctcttttgcgccgtataatacccaacatgatgtggatgcgttggttaacgccgttgaccgcgcgctggaactgctggtggattaatgacaaaccctctttataccggacacccgttcggcacaacggtaacggaagagacgttacgcgctatctttctcccgctgacccagtgggaggataaatatcgtcagttgattctgttaggaaaacagctccccgctctgccggatgaatgcaaagcgcaggcgaaagagatagccggctgcgagaaccgcgtctggctgggctttacccgatcagataacggaacgatgcactttttcggcgacagtgaggggcggattgtccgcggcctgctggcggtattgctcaccgcggtggaaggaaaaaacgccgccgagttgcaggctcgttcaccgctggcgctgtttgatgagctgggtttacgcgcccagcttagcgcctcacgtagtcaggggctgaacgcgctgagcgaagcgattgttgccgcaacgcataagggttgaaatagcgtaaatattctgtcgcctgacagcgccgcccgcagcggtcaggcgatgcagataaaataatccagtcactttattagtttcggcgtcagatttccctgataagcattcttttgatttttatcagctatcacaatgaaattacaatgttagaatccatgttaaaacggcgtgaagattttagagtaaataaagccactcgatgtagcgtagcaggagaactggaaaattcatacgcatcgggtgaagttataacaggatatggataagtggaaaaatatctgcgtagcggtaccatgtttgtggtactggcatttatattatgggggttaacacctttatattatcaatatttatcaggggggaatctcgcacaaatattgatataccgggtgttctggtcaattccattattactggcagtaagattgttatttcggcagcgaacgcgatttcatgatgcctggaaagataaaaaatcttttttcttctgcatgatcgccggacttttgatgattgtctcatggtcatcttttatttatgcgctaacccatcatctggtgcttgatgccagcctcggctattttatcaacccgctatttgttattgcgctgggatgcatttttcttaaagaaaaactgtcgttgtttcaggccatcgccgttttttccggtgtctgcggcctgacttttcaaattatcatgctacggcatttcccggcgctggcgctaaccatgggattatcatttgcgctatatggcctggcgcgaaagtttatacattatgatgtgatgacatcgataacgattgaaacattatgggcattgcctgtctcactattaatttttctctttagcgatactggaccaattatatccgctaatactcctttctttttgtatgtcatgacggcgccagtgacgatcattccactggtattatttgccatcgcgttaaatcacacctcgttgattgtcaccggactggcgcaatatatagagccgtctttacagttcttacttgccattatgatatttggcgagcacattaattacgcggaactgctctgcttttgtgcagtatggttcgggttgtttctatgcatatctgaaaatttatattcccattatctccgcgcccgtctgaaaccggtgttcggcagggtacagcgcttctttcgctaacgaagggcgcagggccggatacgcgtctgcgtgacactccgccccgtccttttattcttgtcgcgccgctttagccatgatcttcttcagcgcatgggaaacggcgacaaaaccgaacgttgccgtcaccatcgtcgccgcgccgaagccagaggcgcaatccatccgttttggcccttctgcggtagctttcatcgcgcatacggaaccgtccgcctgtgggtaaaccagcgcttcggtggaaaaaacgcagtccacgcccagcttacctttactgttcttcactacgccaaaattatgtttcaatctctcgcgcagttttgccgccagcggatcctggatggttttcgccaaatcagcgacctggatttgcgtcggatcgatctgcccgcccgcgccgccagtggtcactaaaggaaccttatatcggcgacagtacgcaatcagcgcggcttttggacgaacgctgtcaatagcgtcaatgacataggtaaaacccgcgttcatataacccgccacattatccggcgtgatgaaatcatcgataaccgttacccggcactccgggttaatttgccgaatccgttcggccatcacttccgctttcgccaacccgacgttatcacgcaacgcatggatctgacggttcgtattggtcacgcagacatcgtccatatcaatcagcgtaatcgcgccgatgcccgtacgcgccagcgcctctgccgcccatgatcccaccccgccgattcctacgacgcagatatgcgcctcagcaaaccgctgcagcgctttttcaccgtacagacgcgcggtgccgccaaagcgttggcgccaggcatcacttatcaccactgacatatgacctcagaataaaaaaaggtgaggttattcctcacccctgctcactattttcaggcccgatagcgatcgcgttatcgggcaatccggttgtcgcagaataccacaatcagccgctaaacacgttaccggcgcccggcgcgctttttaacacccagacgcgaccatagtgattataccatccggcacgatgcccggcatccgggccaattccctggtaaatatcaaagtgctggcctttaatcgctccgccgacatccagtgcgaccatcaaacgtagctcatactgaccgctaaatttaccgttgttatccagcaacggtacttccgccaacaaggtcgtgccaggcggaatgatgctgcggtcggaggcgacggatgctcgcccaatcagcggtacagcgctggcgcctttgaccggcgcaaaagattgcggcttaaagaagacgaacgacgggttctgctccagtaattcacgcacttccgcttcgctgtgcttctctccccattcgcgtatagcctgcatcgacatatcttcttttttcacttcaccgcgatcgataagcactttaccaatactgcgataaggccagccgtttttaccggcataactaaagaagttcagcggactaccatcaccaaaatcaatataaccgctgccctggacatccataataaagttatccatcagcgaattactccaggccaggatgtacttatcgctcagcgcgcctgcgtagatctgagcgcgggacggtaagcgtccgcgttttggcggcatactatagataggatactggaacgcgccctggcgcgtatggcgagcctgaacgacgggcgtatagtagcccgtgaactggacgttaccgtagttgtcggtgccttccatctgccaggcatcgataccaaactgacgcatagtgcgcgtatcgcctccggaacgtaaccagttctggacagcgttatagacgttgctttgattggtgtataaacgcggcgacgcggaacggatctggttgacctgctcggcaaagtctccagcattaatcggcgcgcccactgcgtccggctggtttaccagggagaagggctgggtaaatttcccgtccttatattgctgaccgcgatcggtcggttttgatgaacaggcagccagcattgccagcattacgcctgtcgccacatattttgcccaacgtcctttcatggtgtctcgtcttctgcgtaatcgaaagtgcccggtgaagataacaaaccgtccgaagtaatgaaatgcgatcgcgatctcattatgtaaattcgtttaaaaatcgcgctatctgcggtgtatttgcgcaattcatgagaaattagcgatttatatgaaaaaagggttgcaacaaaagctcagcggagtatagtgcgcatccacggacgcggggtggagcagcctggtagctcgtcgggctcataacccgaaggtcgtcggttcaaatccggcccccgcaaccaattacaatgagaatgcaagtttagacggacgcggggtggagcagcctggtagctcgtcgggctcataacccgaaggtcgtcggttcaaatccggcccccgcaaccaacttaatgaacacccttacgggtgtttttttgtatctgtcgtctggtccgcaacgacagtgcgggcagcatcctacttacccgcgcaataaactcgccgtcatctcaggttaacttcttctcgccagcgtcgccccatcggcaaaatacgctttaatgcccgccagaatcgactctgcgacctgttgctggaacgtcgcggtcttgagcttgcgttcttcttcaatgttactgataaacgccgtctcgaccagaatagacggaatatcgggcgcctttaacaccgcaaaccccgcctgctcgaccttgtttttatgcaggtcattaattttaccaagctgcttcaacaccgctttaccgaatttcaaactatcggcaatggtcagcgattgcaccatatcgaacatcgtatggtcgacataacggtcaccgcttttgctcacgccgccaattaagtccgaggcgttctgcgtttgcgccagatatttcgccgcagtactggtggcgcctttggtcgatagtgcgaatacggatgaaccgctaggctgccggctggtgaaggcatccgcatgaatagagacaaacaggtcggcgcgctgtttctgcgctttcgccacccggacttttaacggaatgaagatgtcttcattgcgcgtcatatagaccttcatgttgccttctttttcgatcaacgcgcgcaggcggcgggctatctggagcaccacgtctttttcacgcgttttgtatttgcctatcgcgccggggtcttcgccgccgtgtcccggatcaagcataataacaatggggcggtcgcgccccgctttaccgggctgcggcccgctttgcgaaggcggcacctgcttatccagatcgcctttattgtagtcttccagcagcgccagcagcggatcctgcatatcctgcgcattggcaggataaagatccatcaccagacgttctttaaagcctgccacaggcgccagcgcaaatagctgcggcttcacgttttgttttagctcaaagaccatacgcacagtcttaggatcaaactgccctacccttgcggatttgatatacggatcgtcgctgcgaatctgcgcgccaatgcctttaagcaccgagttcagattcacatcctcaatatctactaccacgcggtccgggttacttaaggcaaattgtttatatttcagcagacgattcgactctaccgtgacgcgggtatagctggacgcaggccagatacgcaccgcaacgacctggcttacggcagccagcccgacctggctcacgcttaatagccacatggcgcccgcgccttgtagtaaacggcgacggctgattgctgaattggctcccgacatgcttctcccgagcaaaaactaaatagagatcatacaaagttcatccaaattgaccggaaactttagcgaatgacgcataatctgtcatctataaaagggtaaacattctttttatattcacggcattactaagaaaagcgatcggaccgcataaaatttacgcttgcacagagggcaaaaacagaataaaaatacactaatttcgaataataattcactagtggggcgcgcaatgataaaggaacgtaaaaccgaactggtagaagggtttcgccattcagttccctatatcaacacccatcgcggaaaaacctttgtcattatgctcggcggcgaagccattgagcatgacaatttttccagcatcgttagcgatatcgggctactgcatagcctcggtattcgccttgtcgtggtgtatggcgcgcgaccgcaaatcgacgccaatctggccgcgcatcatcatgaaccgatttaccacaaaaacacgcgggtgacggacgccaaagcactggagctggtgaaacaggccgccggtttactccagcttgatattaccgcccgtctgtcgatgagtctgaacaatacgccgttgcagggcgcgcacattaatgtcgtcagtggcaatttcaccattgcgcagccgctgggcgttgatgatggcgtggactactgtcatagcggccgtatccggcgcattgatgaagatgcgatcaaccgccagttggataacggcgcgatcgttctgatggggccggtcgccgtctcagtgaccggcgaaagttttaatctgacctcagaagagattgccactcaactcgccgttaaactgaaagcggaaaaaatgatcggtttctgttcttctcagggcgttaccaatagcgagggcggcatcatttctgaactcttcccgaatgaagcacaggcgcgggtggaagagttggaagcgcagggcgattacaactccggaaccgtacgttttttgcgcggcgcggtaaaagcctgtcgtagcggcgttcgtcgttgccatctgatcagctatcaggaagatggctcgctattacaggaattgttctcgcgtgatggtatcggtacgcagatcgtcatggagagcgccgagcagatccgccgcgccaccatcaacgatattggcggtattctggagcttatccgcccactggaacagcagggcattctggtacgccgttcccgtgaacaactggagatggagatcgataaatttaccattattcagcgcgataatatgactatcgcctgcgcggcgctgtatccttttgtggaagagaaaataggcgaaatggcctgcgtagcggtacatccggattaccgcagctcatcgcgtggagaagtgcttctggagcgggttgccgcccaggcgcggcaaatggggctgcgtaaattgtttgtgctgacgacgcgcagtattcactggttccaggagcgcggttttacgcctgtcgatatagagttactgcctgagagcaagaaaaaaatgtataactatcagcgacgttcaaaggtgctgatggcagatttaggataacaaggggggcctgatggcgctgcgcttatcaggcctacgctcgaaagcatcatttggaggccggataagacgctacgcgtcgccatccggcgagaactcgtcttatccggtacgactgacttcatcaaataaggtggctagcccgctgcgccgctccgtacgcgtcacaatcgcgcctgccaggatccgttcatcggcatacagcgataaccgccgccgcgctcgcgtaacagcggtatacaccagctcccgcgtcacgaccggcgaacgctggctgggtaaaatcagcgcggcgtgatcaaattcagacccctgtgatttatgtaccgtcatcgcccaggttgtatcatgttccggcagacggctgggctgaacggacttgatcgtgccgtccggcatcacaaaccagacgcgtaacccctgcccgcgatcgagcgcaataccaatatcgccgttaaatagccccaacgcgctatcgttgcgcgcaatcattaccggacgcccttcgtaccagcgagaatgcgggtgccgctgaatttttcgttgctgcaccatcgcctgctcaatgcggtcattcaatcccctcacgccaaatgggccttcgcgcagcgcacaaagcagttgatactcattgaaagcctgaaggattgcctccggcgtcgctttttcatgcagcaaccgcaggtagcgaccatagcccgccagcgcttcatccagcatcccggcataatcgtcgctgctttgcaatgtacgcttctctatatcgctaaacccctgctgaaaaacagcctggattgccgacctgtcgccgcagttaattgccgccgccagcttgccgatgccagaatcgctgccgaaacgatagctcttttgcaacaaacagaggctatcgcgtaaagatgcggcttgcgttccggcccccgccggaatggcgctaccagtgagtcgacttagctgtcgggcgcgttccgccgtaaaccctgcgttgacataggcgcaaatatcgcccaacacagcgcccgcctcaacggatgccaactgatcgcgatcgccaagaaaaatgacccgcccgtgcggcggcagagagtcaatcaaacgtgacatcatcggcaaatcaatcattgatgcttcatcgaccaccagcacgtccagatgtagcgggttgcccgcatgatggcgtaatcgttggctgccgggctgtgcgcctagcagtcggtgcagcgtactggcgtcctccggtatacgctttttctgcgcatcggtaagaggaagctgacgcaacgccgcgccgagcgactccgtcaggcgtgcggccgctttcccggtcggcgctgccagccggatacggcaacgttcgccatccgccatttgaattaatgccgccagcagcttcgcgacggtggtggttttaccggtgccgggaccgcctgaaatcacggagatacggcgagttagcgctacggcggcggccaccttttgccagttcacctcgtctgtcggagggaatagcgcgtccagaatacgggataactgatcttcatctacggcgatggcctggttaacctcgttaaaaaagcgcgcaaccgtacgttcgttgcaccacatgcgattcaggtagagacgctcgccgcacagaattaacggcgcggggctatcgccgcagctaaccgccgcagacgccagtaaccgctttttccagtcgattggcgtagccgtttcgcttatacaggcgaccagtaagggatgcgcctcctccgttaacgttaaacgcgacaacggcagacacacgtgaccttcacctgcgtcatgactaagcagcgctgccgccagcgtcacggcgggatcgtcgttaccggcgacggttaaagcaaactgggcatcaatgggccgtaagagtttttgttcaacggcctccagcaaccgctcctggattgtcattgcgcctcctcactcatttcacctgcaaacatatcatccagttggttaattaacgccgccgcaggacgagtggtaaaaataccctgctgcggacgttcgccatccaccccgcgtaaaaagagatagatgacgccgccgaaatggcgttcatagtcgtaattcgtcattcgatgacgaaggtaacggtgcaatgccagcgtataaagctggtactgcaaatcatagcgatgcgcctgcatcgccgcagccatcgccgtctgggtataagcggcgctatcctcgcccagccagttagatttatagtcgagcaggtaatagcgcccttcataacggaacaccaggtcgataaagccctttaacatgccgcgaacctgcatgaaatccagcgcagggcaacctgctgaaagcgggtcgtatcgacgaatcaacgcatccagctctccggcggtaagcggctgggcaatcggcagataaaactccatttcgacctgtttttcacgctcggtcagcacgctcagactaacgcccgtctcgttaaggggaacgtgtaacacggtgtccagccagcgggtaagtacgggctcccatcgcgtttcaaaaccactcagctccagtttttcctgtacccattgggggtttatcggttgagtaaaatcaagctcttcaaacaggctgtgcaaaaatgttcccggcgatgccccgcgaggaaagtgatgcggcgtcattgccggcgcttccgccgcttcgccaacgcctgcggcgtcaatgtcgagacgaggaataagatcttgcgccacgctatgtccccgctgctgcaaaccggaataactggtgacgcgccagctatcataaagcaggcgttgcagcgctctggcgctgagttccgcatgcgatgcagcggcaatttgccagcgatcgttatccgtgttgcctggcgttcgacacacgatatcctcgtcgcatagcgcctcaatacaggcgcgaaggcctgcggcatccatcggttcgcctttttgcaggagtcgcccaagcgcgctttggtgcacatccgtctcgcctttcttatcgctgcgacgccgtaccagcggcgcgacgccgaggctgcaatgccacactgcacgggtcagcgcgacataaagtaggcgcaggtcttccgccaggcgttcggcttccgccagtgctatgctctcttcggcgtgactaaggtccagcaccgcctcgtaggagtgcctgtcgtgataaaaagcctggtcctgcacgcggaaatgggtgataaaaggtaaccagaccagcgggtattccagacctttcgatttatgaatggtgacgatttgcaccagatgcttatcgctttccagacgtagttgctggctggaagcattgctatcgggttcaaggatatgttgcgccagccaacgcaccagcgcatgttcgctttccagctgcgaaccggcttcctgtaacagttcgctaatatgcagaatatccgtcagccgacgttcacctcccgccgtcgccagcaggttttcagcaatattgcgcgccgacattagcgcgcgcagcataggcatcacgccgcgtttatgccaaatctgtcggtagccatcaaactcttcgacaaccgcatcccacgcattttcatcattgttaagcgtttcgatatccagcgcggtaaggcccatcattgatgtcgccagagcgctacgcagcgtattctcacgttcgggcgccatcaccgcctgcaacacccacagcatttcctgcgcttcgagcgtttcgaatacgctgtcgcggtttgaaagatagacggaagggatcgccagtaaggtcagcgcatcccgtatcagcgcggcttcccgcctgctgcgcaccaacacgctgatatccgaggcgcgaacgggccgcgacgaatcgccgttcgtcagcagcgcgtcgcccgtttgcccggcgcgcagccagtcgcgaatttgcgtggcgcacacctgcgccatataactttgataatcgcccgaaccgcagctttccccctccattagccacagggtcatcgccggttgaggcgcgtcattcactttaaattgcagcgactggtttctgggcgcaaactttaccggactgaagggaatatcgcggaacataaaggcgtcattcatctgactgaacagcttgttaacgctattcaccatccccggcgcggagcgccagttagtgtcaagggtatagtgcgcgctcacttcgctgcgagccttcatgtaggtaaagatatccgcgccacgaaacgcataaatcgcctgtttaggatcgccaatcagcaatagcgccgtatcgggttgatgtcgccagatacggcgaaaaatacggtactgttgtgggtcggtatcctgaaattcatcgatcatcgccaccggaaaacgggtacgaatcgccgcagccagcgcctcgccgctttcactacgcagcgcggtatctaaacggctgagcatatcgtcaaaccccagctcgccgcgccggcgtttttcctgagccaccgtttcacggatctctgatagcgctcgggtaagaaccagatctttaatcgatagcggttcgcccaacaggttatcaatggcgacaaacaatgggtgctggggcgtcacgccgccagctttggtgcgctcagctaaaaaacgctgtgaaaattttcccaacgcctcgggtaattgatagtttttcgtctcttcttgcgcccacgcggtgatcttttcgatccatttcgcctgattgccgcggttgaattttctgcgatcgatgccggatgattcgatcagcgcgtccagctcgctaaccgcctcacaccactgctgcttcacctggttgatgcgcgccaggatctgttcatggcgcgatgccagcgtctcctcctgcgatggcggcgctttaatgaccggcgcttcgccctgcagataacgatcgatatcctttaagagcgccttcggtcccttccacacgtcaaacaccacctgcgcgatgtcgcgcggcagcggatagcaatgacgccgccagaaatcggcgcaggcctgataacgcaacaaagattcgtcttcaataagctgttgctcaaacaacataccggattcgaaagcgttcaggctgagcatacgctggcaaaaaccgtggatggtaaagaccgcggcctcgtccatttgtcgttccgccagtaataaccactgcgcggcctgctttttgtcgctaatttcttccagcaagcgggcataaagcggattatccgtgctttcccgcagacaggcgatgcgcaactcatggatattactgcggattcgcccacgcagctcttcagtggcggcctccgtaaaggttaccaccagcagttcttcaacggtcaacggacggggaaatgcggcgctgccgcctaaaccgagcagtagccgcagatacagcgccgcgatagtaaacgttttgcctgtgcccgctgatgcttcaatcaaacgctcgcctgtcaggggcaagcgcagaggatcaagagtctcggcgacatcattcattcttttcgctcattagaggtaacgtttgctgcaaagcgctgacgttatcccacactttccagcctgtcggatgcacgtattctgcttttccattctggctaccggcaatctgtgacaatattgccataccttgtggttccaccaccgcctggtggaagaaatcggcaagcttttgtggcgtcagcaattttatctgagcgatgattttatcacgcgagtcaaagcgcatattaccccgatcgaaatccttgcttaaacgggatgcttcttcgcccaacgtttgcggcgcctggcgcatttgcgtaatgatcgcctgctgaatttgggcgaactcttccggcttcatcgccctcagcttcgcctcggcgtcagggaaaaatgcctgatagcgttgccacaggtaagagggctgtttatcgttgctctgtagcaggaaccccattccccactgacggccaacgctcatcggaaaggcgaaaacggcgtatcccagttgctcttcggttcgtagctgattgtaaaaccacggttgaacaatctgacctaacatcgcgctgtaggcagcgctgacgtactcgtcgtagccgaccggaacaaagaccgcggctaacgcggagtcggtgctactgcccgctttttcaaatattacggactgctttttctcaaccaccacgtctttgttgcgacaccacgccgatccgttcgccgcgagctgtttttgaacatcttgcgccagagaggtcgcctgggcttcgctcatattccctataaccagaaattccggacgagcgcccgtttttaacgcattacgataggccattacctctttcaacgtaatggacggcagcaaagcgcgacgttcatcacgggaaaaataaggcacctgcgaaatcatctgcaccggcataatcgcctgctcgtaggcttttcccttctccgcagaatccatcatctgcgtataccaggatttcgcctgcgccagctgttcctccgtggcgtcgtagctaaaatatccttccagcaacgccaggaaaagctgcggcaaacgctgggtataaccgttcgcagtgaccatcagaccattgttggcgttagtagaaaagctaatgccgcccactgccgcctggttgctgagctgatcgagcgccattcccgccagataatcattaagggcgaacagtacctgattgcgggcgctgtccatcgcctgcgggttacgcaataccacgctcacgtcagcttttggctcgctggcgaaataacgactcggcgcataaaccacgcgcaaatccgctttatcgacaatcagttctggccgcacgtagtttttgtcattcttaacaagcgtaaaatcatcaggaatataggggtttaactccggcagcgacaacgcaatgccctgtgctttttgctgccagtttttaaacgtctgttcgctaatcttatcgacctgataaggcgcatccacaaaatacgccgtcttattatggggttcctggggactgatgtaccagatgcgcgcattctgcggcgtcatcatcgccaggcgatttttgatagcggcaggatcgtaacgatcggcgatattcgccgcatccagcgtatgcgctaccgggacgcggatcatagtgtccgccagccattcgacatagtccatatcgcgggtaatcgacggatagcggaagtcgagatccagcacatgcgccagctcgtcaaagtaacgtttatctatccctttttcacgtaacatattgagatagctgaaaatagccgcgacgacttcatcacgattggctaaacctttatcggtcagcgttgccgaaatggcaaatacgccgctgttaccattaacaatcggatcggaatccgcgctaataccttcgaccagtccttgtttttgcagccagtcagagagcgtccctgggctacgattgccaattagataagagaccagttcatcggtcttgctgcggaactgcgcgctattgttatcaatacgaaactccacgcgcagcactttacgcggtagtgccggcacgtaatgaataatgatgcccttctgcgcctcggtgatgacaggtacggtaatttccggttttttaatctgtttattcggcacgcgaccataggttgcggcggcaatactcgccagttccggcaagggtttattactgtaaatcaccgccttcatcagattagatgaatagtatttttcatgaaaagcgatcaacgcctgttgcaccggatttcccggcttatcgcttagcgtttccagattgccgccagaaaagtgcgagcctggatgcgccgggttaatggtttcggcgcttacctgcgccatacgcataccgtcgcgggtgcgcgccatcgtcagctcggcattcaccgcgtttcgttcgcgttcggcatactttttattgagcaatggcgcggcaatggcgtcggccagtcgatctacggcacctggaagcgcgtcgttttcaacctccaggtagaaggctgttcgataaggcgcggtgctggcgttgtggctaccgccatgtcttttaaggtattcggcaaggctatccgcctgcggatatttttttgaccccatcaggcacatatgctcaagataatgagcaagcccctgatgagcctcaggatcttcaagcgatccaacgggcaccactaacgctgaaagcgactttacagcctgcggatcggatacgagcaacaccaccatgtcattatcaagacgtatcgcctgatactgccgggtatctttatcgcttttacggatagtttcttgcagcggttgccaaccgatatccgcctgaactgcaggcccccagagggcgaccaataacaataacgctttgaaccaggtgctgcggggcattcacggacctcatcattaactttcattcccactcatctgtatggtcacgtaaaccatcgacctgagcagaacgggatattattgtgctgaaccaggcagcatttttttatcagtaatcagtccgtgacgaagagcgcatcatagtcgaagccttttaatggcgcgattttcatacaatcaacgagactgattaaaacgaaacagcggtaacaggtaatgccgtgactgcgcaatgatagcctgcaacgtttcagattccagctgacgccaaagacgttgataccagatatcttcgccttcgccgctcaccatcatgttgccttcataagcctgtagaaactttgtcctggccttctgtaaagtatcatcgtcgtctaacatgacatcattttcagcgtcataacaggcttttatccatgcgccgccgctttccggcagtaccaatagcggagaagacatgccttcccggtagccttcaatcagttgcgccaggtaagccattgcctgcgttttatcaagaggcggaaatcgccactctccctctttacgcaaaaacaggcgactttcgccactaccgccgctggcacaatagacaaggtgttccagccaaagttgcacaccttgcgccacgctgattaaagcgggacgccagcgcaataatccatcctcctgtacctgcggcagccagccggttagctgaacgccattgcaaagcagatccacttccaggctttggctcggcttacggcaggcgatgacccggcttgccagttgctgcatctcctgacattgcgcatcccagaatatttcgccaaacgcgccgtaaggcaactctcccgcagcccggaaacggcggaacaagcgttcggcgtcgtcctcttcaaccagcgtattgagcaactgttggttaagttgatatcgcgtcaatccctctaattcaaacggttccgcatcaggaatctcactctcttccgagcggaaattaacctgaagccgcatctgaaaaaatgcgcgtaccggatgggcccaaaaacgctgcagactttccagagtcaatgtttccggcatcgtaaaaggaagcggctgcacaaagtcagaatgcgcttttcccgactgactcgccgcgggcaaccactctctggcataactttgctgttcgccgggttggtaattttgcgcatcaaaaggcatacgggtatgcagacgcgtaatatgcgctttgactcgtgcttcgctctcatcacaggtcagcgtttcgtcgcccggcaaatagtggctttgtccgatgtaatccaccaattcttgcaccagtacagagggaaagcgttcgctattatcctggatggagcgaccgatgtagctgatatacagcgtctgctgcgccgagattaacgcttccagaaacaggtagcggtcatcgtcgcgacggctacgatccccgcgcatgggtttttggctcatcaggtcaaagcccaacggcgcaagctggcgcgggtatacgccgtcgttcattcccagcaggcaaacgactctaaacggaatggaacgcatcggcatcagcgtacaaatattgatggggcccgccaggaagcgctggctaatacgttcctgatccagacgctgcgccagttcatcccgcagtagcgaaatcggtaccgcgtcgccatattccgccgcgacgccttcggcgataatggcctgccactgctgttcaatcaatgtcattgccgcttccgtgtccgcatcgggcaggaagaaatcattgaacatatcgcgacaaacgggcagccactcttccagcggtcgctcctgcgccagaccgcgccgccagatattaagctgcatcagcagcgaagccagatgcccgaccagctcagcaatcagaccgctggattcgtcataaggcagaaccgactgccactcgccctgggcgctttccatcgcataccccagcagcatacgcgtcaggccaaattgccacgtatgctgccccgtggcaggaagttccagctcgcgtacgttgtcatcgtcaattccccagcgaatgcctgactcattgacccacaagcgcaaataacgcagcccttcttcgttgatcgtaaagcgggcagccaataccggtacgtctaacaacgccagaacatcctcggagacgaagcggctgtccggtaacgaaagcaggctgataaatgcctgtaacaccggatgtgactgacgcgcccgccgatcggaaatggcataaggcagatagcgctccgttggcgcgctaccaaataccgcctggataaacgggctatagctgtcaatatcagccaccataacgataatgtcgcgcggcgttagcgtcggatcggcttccagcatcgccagcaggcgatcgtgcagtatttccacctcgcgctgcgggctgtgacaaacgtgaaaagagaggctgttatcctcgggatcgagcagacgcttattgtcgctgcgcgaatactcctcaagatttacgcccgccaccgcatggctttccagttcaagaatatccgcctgaatccgatgcaaaagattatctggcgtaatatcaacaaacgcatccagttcctggctgttttccagttcagatagcaggtagatataatcccgccccagttttccccatgaggccagtagcggattaccgatatcctgttcaccgtcgctgttaaataaggcttccggattctggttttcacggaacaacggtaaatgacggtcttcaaaactgtgacgacgctggcgagccatgagttttgccagccaggctgggtcttttatatccccccagtaataccgacacggattagtaaaaaggagatggatttcaatatgtttacccagcgcctgcaatgctctgagatacactggcggtaacgcggaaatgccgcaaataaaaacgcgggacggcaaccctggcgggcaggcggtcgcgctttccagcgtttgaataaagcgttggtagagattggcgcgatgccagcgcggctgccccagcgcggcggtatattccaccaatgctttccacaacggcgcctgccagttttgcgcctctcccagaccttccacggtttttcccgcttcccactgcgtaagccagtcaggccgataaaccagatactgatcgaacaggtcggcggcgcgcgcggaaagctgaaagagtttgcgtttatcggtgtcgtcggtcagataatggcgcagcagtacaaactcatccttatccagcaactgcggcagcaaggtcatcagtttccagctcatgctttgtttgctgaaagcgctttctttgggaatatccggcaacacgcggacaaacatctcccagataaaactcgccggtaacggaaaagcgatattcgccgcaataccaaacttttgtgaaagggtcatctgcagccactgcgccatacccgtgctttgtaccagaatcatttctggttcaaagggatcatccagccgctcgcgttcgacgatgaactccatcaacgcttccagcacatccagacgattggagtggtagacccttaacataattactcctgacgattaacgatttggacaatgcaagcgcgtcatctgcccctgcctgccagagggtgaaaccatcgtgacgctgatgctgacacatcccgattgcgttgtctgcatccggttggccttccagtcgtcagcaggcgaaaatggatacagcgccgtttgctgccacgcctgccgccagatctggagatactggtgtcgtaatgcaaaactgtgcattaatacccgctgatagcctgacagcgcggtgacgatcattaccattagaaccatcgccactaaaacttccgggaggctaaacccgcgttgtaaattcaggggatgcgacataacgccacctcttttaacggacaaaaatcgctccagccgtggggagaaaagacaatgcttccctgaatgacgttgcccaaacgccataacgtcatgccgtcatcttgcgccgccatcaccacctcatcccccgataatctccgcaaacagactctcgctcctgaagaggaatagcgccgacattccatttcggttacgcctgaccatagctgcccccgtccccattccagcgccgactgcacaagcgcctggcgttgtatcgccaggctctgcgtcgtcacgcgggcggcatagctggcctgctgctgatttacgccttgcagtagcagactgcccagaatcagtattaaaagcgccagtattagcgaagaagcgccacgttcccgattcacagattaaatcccgttacgctgtattgcgcgtcaataaccgtctgaggctcggctttgctggcgccgcgcagatgcagcatgagcactggcgagaatcccgttatatcccggcgctcaacggtaaacgccgtgatgagtaccgtattgggatcggtcattttttcccatcccttaccctggcaagatgttgctccgcgtaatgtctccagaacgttatccttcatacggaacccggtctggtcggcctctttcgccggtatggtatcccagaccccgttattattcccgtcccactgaacgatgacgcattgcccctgttcggcaagatgtaacccttcgccaatgcagtggccatgacagtaacccgcacgttgaagatgcttcgctacggtataggttcgctgccagatttcatcttccagcgataactgtcgcgtgttgtgccagatctcgcgttgtagcgccggtaaaaatcgtgcggacccaagcagtaaaatggaaccgatcgccatcgccagcacaacctccagtagcgagaacccccgcgtggttattgacacgtggcggcctcgttacgctcgcatagcctgattcgcccccaggaggagacgaccagacgccactctccggcagcgtttttcagtacgatgtgccctgcccatgccgtattgcgcaagccaaagaaggctaacgacggcgtgatatcggcaaggacgacatcacgccagtcgggcgtaaacacaaagggggaagatggcgtacacgatgtttgcgtagcaacagagctgacaaagcaccatgaaccgccttcgctgaccacgcgaagaatgtgatcgcggttatgccagtgagcgtccccacgaagttgcagcaggtaatcccgcacctgacatgcggtttgccacaggcgctgttgctgctgccagcgttgccagccataaagtcctgtggcgctgagaatgataatgagcgacatcgcgaccaccgtttcaatgagcgtatagccctgttgttttttcatgtcggcagtatggcgggcggaagaaaaataacgagcgccaaatacagattgttcggcgcgttacggaaaaaagttcatgtcttgcagcgcgttgcaaaatttcaggaatgcgcgccgaagattgagacgaagggtaaaaaaaaccgacgcgcgatgacgtcggttatggcaggatcgtcagcgcttagatagcgaccggcgctttaataccggggtgcggatcatagccttcaatttcgaaatcatcgaaccggtagtcaaaaagcgaatcgggtttacgcttaatgaccaatttcggcagcgcgcgcggttcacggcttaattgcaggtgcgtctgctccatatggttgctgtacaggtgcgtgtcgccgccggtccagacaaaatcgccgacgtccaggtcgcactgttgcgccatcatatgcaccagtaacgcgtagctggcaatgttgaacggcagaccgaggaacacatcgcaggagcgctgataaagctgacaggagagttttccatctgcgacataaaactggaaaaaggcgtgacacggcgccagcgccatcttatccagctcgccgacgttccacgcagaaacgataatacgacgagagtccgggtcgtttttaagctggcttaagaccgtggcgatctgatcgatatggcggccatccggtgttggccatgcacgccactgcttaccataaaccgggcctaaatcgccgttctcatcggcccattcgtcccagatggtgacattattttcgtgcaggtaagcgatgttggtatcgccctgcaaaaaccatagcagttcgtgaataattgaacgtaaatggcagcgtttcgtcgtcaccagaggaaagccttcctgcaggttaaaacgcatctgatggccaaaaatggaaagcgtgccggtgccggtacggtcgtttttctgtgtgccttcatccagcactttttgcatcagttctaaatactgtttcatggttcctcaggaaacgtgttgctgcgggcggcggcgatatgcccaaaccatcatgatcgcgccagcgataatcatcgggatagagagaatctgccccatgctgatgtactgtacccacgcgccggtaaattgcgcgtccggctggcggaagaattcaacaatgatacgaaacgcgccatagccaatcaggaataatccggagactgcgcccatcggacgcggtttgcgaataaagagattaaggatgataaacagcaccacgccttctaatgccaactcatacaactgggaagggtggcgtggcaatacgccgtaggtatcaaaaataggctgccattgcggatgtgacggcagcagcgcaatatcttccgcgcgtgagccaggaaagagcatggcaaaccggaagtcaggatcgacgcgcccccacaattcaccgttgataaagttgcccagacgcccggcgcccaggccgaacggaattaacggcgcaataaaatcagacacctgaaagaacgagcgcttcgtgcgcctggcgaagataatcatcaccagtatcacgccgataagcccgccgtggaaggacatgccgccgtcccagacgcggaataaatagagcgggttatccagaaacagagggaagttataaaacaggacatagccaatacgtccccccaggaagacccccaggaaacctgcatagagtaaattttcaacttcgtttttggtccaaccgcttcccggacggttagcgcgacgcaccgccaaccacatcgcgaaaacgaaccccaccagatacatcaagccataccagtgaagcgcgacgggcccaattgagaaaatgaccggatcaaagtccggaaaatgcagatagctactggtcatctgtcaccacaatttcttgttatttcgctgaagagatagcgattgataagcgcgcctgcgcgttgcagacgctccaaaggtgcgaataatagcacaagggttaaaagcgagatgccgattaccgttaaaagatatgtatacgcattgtctttcatcttgcaggcgtgttgtctgcgccgtgaatccacagtcactctcttttcccgctccagtcgttacaaccctcctcgaatcaatccccccatcccgcggcgctccataaacgccgccacctgatgacgcacttcggtcgccatctgcgcctcaaggctgcgtctggcaagggtttgcgcgtcttcaaaatcgatatgccgcagcagatatttcacacgcgctaccgaacggccattcatcgaaagatggcgatatcccagaccgataagaatcgccacgcacatcggatcgcccgccatctcgccgcacaagcgaagatcgaggccatgtttttcggcttcctgcgcgatcatggacagtgcgcgcagcatagccggatgcagactgtcgtaaatactggccacgcgggtattgttgcgatctaccgccaggatatattgcgttaaatcgttggtgccgaccgagataaagtcgatccggttagccagatgcggcagcataaataccattgatggtacttccagcataatgccgatacgcggtttcgggatcgcatagccgatcatctcctcgacctcgcgcccggcgcgttcgatcagacgccgcgcttcatcgacttcatcaatactggtgaccatcggcagcaaaatgctgaggttgccagtcgccgcattggcgcgcagcatcgcgcggacctggatcaaaaagatctccggctgatccagcgtaatgcggatcccgcgccagcccagacacgggttctcctcgctgatcggcatatagggcagttgcttatccgctcccacatccagggtccgcagcgtcaccggtttatcgttaaacatttgcagcatcccttgatactgcgccacctgctcttcttccgagggaaacccgctttgcagcataaagggaatttcagtacggtacaggccgataccgtcgatccgactgcctaacttttcctcatgctcgggactgagcccggcattcagcatcactttgactcgctcgccgcttttcagttgggcgggaagattgacgtcgtcctccgccagacgactgagttctatctcttcactaatgagccgctgatattcctgaataagcacgggttcaggatcgaccagtaattcaccgcgatagccatccaccaccaacgtacggcgatgtagcaccgaaggctggatatcagcgcccatgacggtcgggataccgagcgcgcgcaccataatcgccgcatgcgagtttgccgcgccgtcgcgcaccacaacgcccgccagcctgtcctgcggcagctccgccagggtggtcgccgacagctcatccgcgaccagaataaaacgttccggccaggcgtttggcccctgaactgaatcatcaagatggaataacagccgctgccccagcgtgcgtaagtctcccgcacgttctttgaggtagttatcggttagcgccgcaaattgctcggcaaatttttcgatgatttttttaacggcccactccgcaacagcgcctttgtcgacctcggcgaagagttcgcgacgcagtctggcgtctgaaagcaggtgtgagtacagatcgaaaatggccgccgtctctttttgcgcgccggcggcaaagcgtttgctgtatcgtcggaattcgttcgccgcctcttccagagcgccggtcagtcgttcgcgttcaagagaggtatccagcgtagacgcttcgtaaacctgttccatcagcggcatggtcgcgtcttgccagcccgttgcgatagccacgcccggcgccgcaggaagcgcgcggattcgcgtctgccggtattgcccgaacagcgctgtgacctgcgactgtgacaggatagccgccatctgcgtagcgagcgtgacgaggaaagactcttcgctttcatcgtactggcgcaattcgcgctgctgtacgaccagcacgccgagaagttggcgacgctgaatgatcggcacgccgagaaacgcgcgaaaacgctcctcttttaccgaaggaatgtatttaaagctgggatgtttttgcgcatcggcaaggttaatgggttccgccagtctgcccaccagaccgacgatcccctcatcaaacgcaagcgcaacggttcgaccacgcggttttttcaacccccgcgtcgccatcaggtaataacagcgtcggtcatgatcggccaggtaaaccgagcaaacctctgtatccatcgcaagacagatatccgtgaccagaatattcagcgcctcgttcagacgcggcgcactggccactttttcgactatttcgcgcaggcgagtgagcataatttgcgtggcttaacctcttttacgtcgataagcaggcgcgctttgtagcttagggggattatcctgaagcgccatgacaacacttgcaaactctttcattaccctgcggtagacatcgcgtttaaatgacaccacttgtcgaaccggataccagtaacttacccagcgccagccgtcaaactccggcgtactgctggtttgcatattgatttcggcgtcggcgctcattaactgcaaaagaaaccacttttgtttctggccgatacataccggctttgtgtcccaacgcaccaaacgttttggtaacttgtaacgcaaccagttgcgagtagaagcaaggatccgcacatctttacggcttaacccaacttcttcaaacagttcccggtacatcgcctgttctgccgactcccctggatttatcccgccctgcgggaactgccaggagtgctgaccaaatcgccgggcccacatcacctgcccctgacgattacaaattacgatacctacatttgggcggtagccatcgtcatcaatcaccggactacctcaacataaaccttatatatgaacgattgtttcatactccagtgaggcggtaaaccactctgtaatagtgacacagcctaataacaattgaataactcacagtaaatagccgagttataaacagatgatgacgcccttgcgccattttattcaccttttctgtggatatagttgtgaagaagtatggaattaccacgggaaaacccagaacagtctgaattcctcatgctggagacagtaaaaatagtgccttatattcattgcgttatagacaaatcttacatgctaccttcataaagcgtgaccagcatcacatctaagatccttatgctgatgaaagatcaaccagcgtcggttttatccacagattgtgccaataacttacgcactatttgtctgaattttcgattttcgtcgcacgtcaaggctgtaaatggaaacagtagtggcggttttacacagttatcccaactttctgtggataacatagtgtaagatcctgtttattgtcagtgaccagaattggaaaacccgcttcagcgttgcgcaacacgaagaaacaacacaaaaaaggcaataaaaatcagtctattgaatataagacacagaaaaagataaactctgcccatacggtataaaatcactgctcattttttaatctaaggtaatggtaatgtccgctctttgtccgctactgactccgcctgcttcggaagcattgctgttagcccaggcgcggcagctttccggctatacgttaggcgagctggcggcgatggccggcattaccacgcctaaagatttgaagcgagacaaaggctggatcggtgtcttgctggagatctggctcggcgccagcgccgggagcaagccggagcaggatttcgccgcgttaggcgtagaactgaaaaccatcccggtggatagtctgggtcgtcctctggaaacaacctttgtttgcgtggcgccgttaaccggtaacagcggcgtgacctgggagacaagtcacgtacggcataaattgaagcgcgtgctatgggtgccggtcgaaggcgatcgcagcataccgttagccgaacgccgcgtaggttcgccgttactctggagtccgagtgaagaagaggacaggcagctacgcctcgactgggaagagctgatggacatgatagtgctgggccaggtggaacgcattaccgcccgtcatggcgaagtcttgcaactgcgacccaaagccgccaatgccagggcgctcaccgaggctatcggcgcgcgcggggaacctattttgacgctaccgcgtggattttatctgaaaaaaaattttacgcaggcgctgctggctcgccattttttattgcagaatccgtaacgtccattacacgcaaatgcgcctccgctatggctacgcgtcggaccgacgctcgataaacgtaagcgtattgtcgccgctattttacaccgttcctggttgcgcaaattcagcctgggctttcgcccgtcactcgacgggcctataattaccgcttctttttttggcaggactttgttcgatgttatttgcatggataaccgatcctaatgcctggctggcgctcggtacgctgacgctgctggagattgtacttgggatcgacaacattatttttctttctctggtggtagcaaaacttcccacggcgcaacgaaaccacgcacggcggcttgggttggcggcggcgatggttatgcgcctggcgctgctggcgtcaatcgcctgggtcactcggctgactaatccgctgtttgagcttttcggcgaagcgatttccgcccgtgatctcattctgttactgggcgggttatttttaatctggaaagccagcaaggagatccatgagtccatcgaaggcgaagaagaagggttaaaaacccgggtttcttctttcctgggcgcaatagtgcagattatgctgctggatattattttcagccttgattcagttatcacagcggttggcctctccgatcatctgtttattatgatggcggcagtcgttattgccgtgggcgtcatgatgtttgcggcacggcccatcggcgagtttgtcgatcgtcatccgtcggtaaaaatgctggcgctctcctttctgatcctggttggctttaccctgattctggaaagtttcgacgttcacgttccgaaaggttatatctatttcgccatgttcttctctatcgcagtagagagcctgaacctgttgcgtaataaaaagaatccgctgtaatcctgtctcgctcccccgccggggagcgaatactcactttatttcctttcttctcacagattaagattttgctgcttccgacatgcagagctgcgcgttattactagactattatcagacatatgattaacagactattatcagatgcaggctatgtgaggacaaacggatgaaaaagtgggcagttgtaatttccgcagtagggttggcttttgcggtatccggatgcagcagcgattatgtaatggcgacgaaagatggtcgtatgatcctgaccgatggaaaaccacaagttgacgatgataccggtctggtcagctataccgatgcacagggaaacgagatgcaaatcaaccgtgacgaagtatcccaaatcatcgaacgttaagcggtggcctgtgatcgaggtcagcgttctgcaagccttcaggctgcgtcccgtaacggtgcgtggcgaccacgcccggtaacaattacgccgcgcagcctgcaattttactttcccttttgccttccctctgccatttttattgtcctttgtcgggaatttctgacttcataataaaaaggaaacggctatgcactatcaccgtataccccacagctcgctcgaagtaagtacgctagggctgggcacaatgacatttggtgaacaaaacagcgaagccgacgctcacgcacagctcgactatgccatcgcaaatggcattaaccttatcgacgccgccgagatgtatccggtaccgccgcgcccggaaacacaagggctgacggagtcctatatcggtaactggctcgccaaacgcggcaaccgtgaaaaactgatcatcgccagcaaagttagcggaccggcacgtaataatgatcaaggcatccggcctcatcaggcgctggatcgtaaaaatattcgcgaagcgctacacgacagtttgacccgattgcagaccgactatctggatttgtatcaggtgcactggccgcagcgccccactaactgcttcggtaaactcggctataactggacggactccacgccagtagtaagtctgctggagacgttagacgcgctaagtgagtttcagcgagcgggtaagattcgttatattggcgtttcaaatgagacagcgtttggcgttatgcgctatctgcatctggcggaaaaacatgacctgccgcgtattgtcacgatccagaacccctatagcctgttaaaccgcagctacgaggtcgggctggcggaagtcagccagtatgaaggtgttgaattgctcgcctactcctgtctggcgtttggcacattaaccggtaaatacctgaacggggccaaacccgcaggcgcgcggaataccttgttcagccgcttcacacgttacagcggcgaacaggcgcaaaaagccgttgcctcctacgtcgatatcgcgaagcgtcacaatcttgatccggcgcagatggcgctggcctttgttcgccgccagccgtttgtcgccagtacgttactgggcgcaaccacgatggcgcagctcaagacgaatgtggaaagtctgcatctgacgttaagcgaagaggttctggcggagattgaggcggcgcatcaggtttatacctatccggcgccgtgatggtcagtgcccggtggcgctacgcttccgggcttacagagacaatgtaagcccgataacacgcactcgccgcccggcatattcactcagtatgatgcctgccggcgctgccagatccacagcgccgcgatcgccagcgcgaacagcacgccaaagccgatacctatcgccactgccggaacgccaaccagcaccgccagcgagtacagtcccagcattaatagcatggcgctattctcgcccagattttgtacggcaatggcattcccggcgccaacgctcttcttaccgcgctcctggagcaaagcgttgagcggcaccacaaaaaagccgcccagcatacctatcaacagcaacaaggcataagcaggcagcaatgcgtgctgtaatgagaagatcgcaaccacaacgccaatcaaaatcccggcgggcatacagcgcgatacggtctccagcgtcaccagttttgccgccgcgcccgcgccgaccacaatgcctaccgccaccatggcgttcaggtaagtcggcgtggcgttatccgtaatccccagcgccaccggcacccacagcaccagcagaaaacgcagcgtcacgcctgcgccccagaatagcccggtccccaccagcgaaaaacgcgtttcaccgttacgccaaaggacaacgcaagcgctgaagaaactacgcgtcatcgccgacaaccgccaggattgtcctggacgcgccgccacaagcttcgggataaacaggttcgccgccactgcgccagcgtaggccaacgcgcaggcaaccagcgcagcgatgacatgccagtcggccaatacgccgcccgcgacggaaccgagcaaaatcgccgcaatcgtagaggcttccatcaggccattggctttcaccagcttatcgcccgtcgtcagttcgcccagaataccgtatttcgccggagaataagccgccgcgccaatcccgaccaacgtataaccgacaaaaggatttatgccgaggcagatacctgccgctcccgccagtttaagaccattggcgaccatcatcacccggcctttggcaaagctgtccgctatctggccgacaaacggcgcaaaaagaatgtaagcgcccacaaacaccatttgcaaaacaggctggctccagtccgggtaaaactgagctttcagcagtgccagcgtcgcgaacagcagcgcattatcgccaaaagccgagagaaactgcgcgacaatcaccgacagcatccctttcgaccagatggaggtgttagtacgtactgactcactcatgatgttgttccggcgcatccacccaacttttcagcgtcacaaaatcgggtttcccgctgccaagcaagggaagctgcttcagataacggatatcacgcgggacggcaagttccggaataccgtgttcacgagcatagtgctgtaacttttctcgggtgagttcgctgtcagtcgtaaacagtaccagcgcttcacctttgctggcatcgcttttaatggcggtagcgtgcattttgtccgccgaaacgccaagcgccagttgctcgaccatctccagcgagaccatttcgccagcaattttcgcaaagcgtttcgcgcgcccctgaatctgcacaaaaccattttcatcgaagcgtacaatatcgcccgtgtcgtaccagccgcgctcagtttcgcctctggagttttccgccgacggcacctccagcacgcccggtttttccacgcgcagatagccattcatgatattcggccctttcagctgtagccgaccgccgttttcaataccgggcaccgccagcagacgcgcgtccatgccaggcagaatgcggccaacagtgccaggcttagccgccatcggcacgttaatcgagactactggcgcgcattccgttaccccgtagccctcaagaatgcgcagaccgaatttatcctgccacagttgtttggtgctctcctgaagtttttccgcaccggccaccacatagcgcaggcgataaaaatcatacggattggcaaagcgcgcatagttgccgaggaaggttgacgtaccaaacagcacggtacagttacggtcatagaccagttccggcacaatgcgatagtgcagcggacttggataaagaaatacttccgcgccggtcaacaacggcgtaaacaggcccaccgtcaaaccgaacgagtgaaagagcggcagcgccgacataaaacggtcattggcggtgaaatccgcaatcgtttttatctgctcgacgttcgccagaatgcttttatggctgtgcaccacccctttcgggtgcccttccgagccggaggtaaaaagaatgatcgccgcgtcttccggctgctgttttacctgcgccagtcgcggcgccaggaggtgggcaaaaatccacagcttgtcggcgggtgtgacgtccgcttttaaatcttccaggtaaacccagcgaacctgcgttagctgttccggcaggtgccacaatttacctttatcgaggaactggcgggaggtaaaaatcgttttaatttccgccgcggtaatcgcgctggtcagcccttttacccccgccgtgtagttcatcatggccggaatgcggcgacgagaaaccgcgccgaaaatcaccgccgcgctgatggcggcattcggcagcattaaaccgattttctcgccctcaacgctgtacttttccagaatccggccaacaaaaagcgtcttggtcagtaacttacgatacgtatccggcgtaaagttaatgtcctcaatacagtttttacccgcgccgtaacgatattgcgccgccagcaacgattcgtataacgtctcgcgcgggcgcaccgccatacgcgcttccatcatgatctggtgcagcatctcacccgctatcttacgtctgtcgcgcgcgcgcggcgcttccggcatcggtatttgcgtcggcggtaaaatatgaagctgaatgcgggggaataagcgccgtttaaccagacctttcaggcgactgaaaggggtcagctccgcgccgtcaatgcggagcggaatgacggttgcgcccgattttgccgccacaaagcctgcgccgtcataaattttcatcagcgagccggtcacggaaatccgcccttccgggaaaatcaccactggacgcccctgttccaccagacgcaccaggtgtttaatggacatgggtttagtggggtcgagcggcacaaaatcgatcagcggcgttaaccagcgcatataccattgctggctgatggaggtatataccgcaaagacaggccgtaccggcaaaaacagcgccagtagcataccatcgataaatgaaacgtgattgggggtaattaagacccggttcccctgtagcgcccggacatcgccagtgacgcgcacacgataaagcacgcgaaacaggttacggaaaaatccaaacagcatttcaactccctttggccgacaattcgctaaaagatgaattgtggcagattacacgagttgcgtaacaggagcgatagcaaaataggttcgaaaaaaaacctgcgcatccgcgcaggttggtgcaagagacaggtacgaagagcgtaccgaataatctcaccaatcaatacctctgggatcttgattgtgggcttcgcgcgtctgcatcgccagtccgaaaacgcaaaggaataaacggaaatgcaacgagttgtgtaaattatccgttactgttacaggttcaggcgaaacaaaaaaaaacctgcgcatctctacgcaggttggtgtaattcgtgtgatcaacaatgacgttgattccacctatcaatacctctgggatcaccactctatcaacctgactcgctggcctgccagcagacaatcgcaacagcgcttcgcaaactgtaacgaaagatttgtattgtcactttacagacgcatttctcccgtgcaggtcacatttgcccgacacggcggggcaagaggcttgaacagacgttcattttccgtaaaactggcgtaatgtaagcgtttacccactataggtattatcatggcgaccataaaagatgtagcccgactggccggtgtttcagtcgccaccgtttctcgcgttattaacgattcgccaaaagccagcgaagcgtcccggctggcggtaaccagcgcaatggagtccctgagctatcaccctaacgccaacgcgcgcgcgctggcacagcaggcaacggaaaccctcggtctggtggtcggcgacgtttccgatccttttttcggcgcgatggtgaaagccgttgaacaggtggcgtatcacaccggcaattttttactgattggcaacgggtatcataacgaacaaaaagagcgtcaggctattgaacagttgattcgtcatcgttgcgcagcgttagtggtgcacgccaaaatgattccggatgcggacctggcctcattaatgaagcaaatccccggcatggtgctgattaaccgcattttaccggggttagaacaccgctgtgtcgcgctggatgaccgttacggggcatggctggcgacccggcatctgatccagcaaggtcatacgcgtattgggtatatctgttccaatcacactatctctgatgccgaagatcgcctgaggggctattacgatgcgctggcggaaagccatatcccggctaacgatcggctggtgacgttcggcgaaccggatgaaagcggcggcgagcaggcgatgactgagttattaggtcgcggcagaaattttaccgcggtggcctgctataacgactcgatggcggctggcgcgatgggtgtattaaatgataatggcgtgggggtgccgggcgaagtatcgctcatcggttttgatgatgtactggtctcacgctatgtgcgtccccgactgaccaccattcggtatccgatcgtcaccatggcgacacaggcggcggagctggccttagcgctggcagggaaatgtcctacgccagaagtaactcatgtatttagtccgacactggtacgccgacattcggtgtccacgccgacggataccgggcacctgtcgacaaccgattaatcagggtagcatgatggcgacaatgctggatgtttcccgccatgcgggcgtatcaaaggccaccgtctcacgagtgctgaatgggacggggcaggtaaaagaaagcacgcgccagaaagtgtttacggcgatgcaggctctgggctatcgccccaacctgctggcacgctcgctggcgaatcgcaccagcaacagcatcggtctggtcgtctctacgtttgacggcttctatttcggcagtttgttgcgccgggcgtcgcgccaggcggagtctcataacaagcagttgatcgtcaccgatggtcacgatacgccggaacgagagcagaaagccgtacaaatgttggccgacagacagtgcgacgctattattctttacactcgctatatggatgagctggcgattttgtcgttgattgacgccacggaaatgccgctggtgattattaatcgcaacgtcactcaggcccgcgatcgcgctattttcttcgagcaggagacggcggcattccaggcggtggaatatctgattacgcagggccatcgcgatatcgcctgtattacgctgcctgttcatactcccaccggcacatcacgcgtagcgggttatcgcaaggcgctggaaaagtatggcattccctggcaaccggcaaaagtgaaatacggcgattacacgctgacgcgcggctatgacgcctgccgggaattactggaggaaggcgtcacgtttagcgcgctattcgcctgtaatgatgacacggcgctgggcgcggcaaaagcgctgcgccaggccggattacgcatcccacaggatgtgtcgctgtttggttttgacgatgcgccgggcgcaacctggcttgagccggggctttcaacagtctatttacccatcgaggctatgatagccaccgcgatcgatcaggccgttcgtctggcgaacagcgagccggtcgccccgatcccgccctttaccggcacgctgattctgcgcgagtccgtcgccgcgggcccgttttttcaacgtccggcctaatgatgcgcttcagagcatctccagcgctaacagctcttcaatggtttgacgacggcggatcagccgcgcctgtccattgtcaaacagcacttccggcaggagcgggcggctgttgtaattcgatgacatagacgcgccgtacgcgccggtatcgtgcaatacgaggtaatcgccggggatgaccgcaggtaaggcgcgtgtttcaaccattcccccttcctgctgcgtaaaaacatcgcctgattcgcatagcggcccggctaccaccgtctcgacccacgggccattttcaagcgcgcgaccatccgccgccagcgccgaaatacggtgatagctaccgtacatcgccgggcgcatcagatcgttaaaaccagcgtcgaccagcacgaaatggcggcttcccatctgttttacgctacgcacctgcgttaccagcacgcccgattgcgccaccagaaaacgtccaggttcgatctcaagtttgaccgcatgtcccagatggcgggcgatttgctcgcgcgccgcgttccacaggccatagtaatggcgcgtatcaacgggctcttctccctcacgataaggtatcgagagtccgccgcctgccgaaatcgcctccacatcctgaccacattccagcacctggcgtaccatcgcgccgcaaacctgctccagatggccataatcgacgccggaaccaatgtgcatatggataccgacaagtttcagtcggtatttctgcattaccgccagcgccgccggaagatcgctatgccagatgccgtgtttgctgttttcgcccccggtgttggttttctggctgtggccgtgaccaaagccaggattcacgcgcaaccagacgcgatgcccaggcgaaacctgaccaagctgcgtcagcatatctaccgagccggcattgaccggaatatgcagttcgctgacgcgcgccagcgtggcggcgtcaatcacatcggcggtaaaaacgatatcatcagggcacgtttgcggatcgtagcccgccgccagcgcacgttcgatctctcccaatgaaacagaatccaccttgacgcccagcgcgcgcattaagcgcaggatatgaatgttcgaacaggctttttgcgcaaaacgcacgacgtcaaactgctgcagggcggctatctgacggcgaataatgtgcgcgtcatagacccagaccggacagccgaattcagcaggcaatctgagcaaattttcagcgttaaggtcagtttcagcgtgataatgcggcaatgacataacaaactccggaacgggctttttaacgattacgccataccttagaaagaataaaaaatatcgttttattgtcagtctatgcaaaaatgatatgggataaatgattcagggaaacgtatggctgccgttaatttacgtcacattgaaatttttcatgccgtaatgaccgccggaaatctcaccgaagcggcgcggctgctgcatacctcgcagcctaccgtcagtcgcgagctggcgcgttttgagaaagtgctgggattaacgctgtttgagcgcacacgcgggcgcttacatccgacggtgcaagggctacgcctgttcgaagaggtacaacgctcctggtatgggttggatcgcatcgtcagcgcggcggaaagtctgcgcgagttccgtcagggcgaactctctatcgcctgcctgccggtcttttcacaatcctttttgccgccgttactaccgccttttctggcacgttatccggatgtcagcctgaatattgtgccgcaggagtcgccgttgctggaagagtggctctccgcccagcgccacgacttagggctgacggagacgcttcatgccccggcaggaacaacccgtaccgagttactaacgctgaatgaagtgtgcgtactgccctgcgaccatccgcttgccgccaaaacggtactgacgccagacgattttcagggggaaaactttatcagcctctcccgcctggacagctatcgacagttgttggatacgttatttgccgaacatcaggtgaagcgcagaatggtggtggaaacgcatagcgcggcctccgtctgcgcgatggtgcgcgccggggcgggcgtttcgatcgttaacccgctgaccgcgctggactatgccgccagcggcgtcaccgtccgccgcttcagcattgacgtgccctttaccgtcagcctgattcgcccgctacaccgccctgcctccgcgctggttgacgccttcagtaagcatttacaaacgcacctttcgcgcctggtcgaaccgctggaggttattctggggccgatgacgaaagcataaagctcacggcatctgcggcatgaattgccgtggtatcgaaaaccggtagcgcgctttgcgtctggggaacaagcaaacctatttcagtacagccaaaaataacgccctgcgcgccttgcgcagccagttgttcgataacctgtaaataatagtggcgcgacgcgtcagtgaatgtcccctgacagagctcgtcaaaaatcacctgattgatacgcgcccgatcgtccgcctccggcacgatggtctcaatcgcaaattgctgttccagccgcccgcgataaaaatcctgttccatcgtatagcgagtccctaatagcgccacgcgatgcaacccctgacgggcgatagctcgcccggtagcatccgcgatgtgtaggaaaggcagagaacaacgagattcaataacgtgcgcgattttatgcatggtgttggtacacagcacaatgccttctgcgcccgcctgctgtaacccatgggcggcctgcgccaggatatcgcccgctttatcccactcgtcgcggcgttgacatacttcaatatcgtggaaatctacgctatgcagcagtaagctcgccgagtgcaggcctcccaactgctgtttaataccttcattgattaaacggtaataagggatagtcgattcccagctcatcccccccaacagtccgatcgttttcactgcgctctcctttttgtaaagcattatggcagtgaagcaaacttacacatccgtttccagtctatttttcatcatgccggataacaggcgtcatccggcatgggaggggggattacacgccaatatttcttagcttctcgcccgccatcagcttgcgttcgatgtgctccagggtgacatttttggtttccggaatcagccagaaagtgatgccgataaaagcgatattcagcgcggtgtagagccagaatgtacctgccgcgccaatgctgtccaacagtgtcaggaatgtcgcgccgatgatcatgttcgatacccagtttgtcgtggttgaacaggtaatgccaaaatcacggcatttcagcggctggatttccgaacacagtatccacaccaccggagcggcgctcatcgcgtaaccggcgatacacatcatcgtcatcccaacggaaagccaggagagaccgcttgatgccgtaccgttatcaaactgcatcaggcagtagcccaacaccaatgtccctaacgccattacgctgaaaccgatttttaacgccggtttacgcccggccttatcgaccgtaaagacggcgataaacgtcgcgaacataaaagtcagtccgaccaccagcgtggcgatcatttgctgttccgtggtggtaaagccggccattttaaaaatgcgcggcgcatagtacataatgatgttcatgccggtgaactgctgcattgcctgtagcagcataccgaggaacacggcgcggcgaacattgcggttagctttaaataatgcccaccctccctgcttgagtttgaggctttcccgaatctcattcagttcatcacgggctttttccgaggtatcgcgcagcatacgcagcacctcttccgcttcaatatggcgacctttttgcgccagccaacgcggactattcggcaggaataccaccagaataatgagcaacaccgcaggcagcgccagcacgcccaacatcgcgcgccagttgccgctgtagctgaatgccgtatcggataaaaaagccagcacaatgcctaacgtcaccatcagttgatacatactgatcattttgccgcgaacattttcacttgccatttcagagagataaagcggcgcggtataggaggcaatccctactgctacgcccagtatcacgcgggcgccaatcaatacttccacgctggaagcaaacgccgaccccagcgagccgagcacgaacaaaatcgcgccagccatcaggctatacttacgccccagccggaatgaaagccagccgttaaataatgcgccaattgccgcgccaagcatcatgctgctgacgacccattcctgcagccggctggtcagtacgaaatggtcggtaataaaaggcagcgccccggcgataacgccgatatccagaccaaataacagtcccgctaccgctgcagaaaccgaaacaaacatattcatacgtcgtgtgtcgcgaagcgaacgcggcgttaaagcagagtcatgattaatagagaccatattttcctgccacaacagagtaagacatagcctgaaagtacgggatactcttcctcaagtgtcaggctggaaacggcataaatatggattaaatggctacgctatagcgatatgtgatggatattacactttttaaatttaacgccgttgccgggtatttttttaaaccaccaatatttcaatgaattaaagcattgatcatagctattatttaacaatatatggattaagttaaacccacaatatggactatgctaatgagatcataaaaaaaccctgtacgaggacagggctttatcagttttttcggccaaagcgtcgattttcccagaaacgcatttgtcagtagcggattaacgcgccagccaaccgccatctaccgctatggtatagccgttaatataatcagcggcgctggatgccaggaagactaccggccccattaaatcgcccggtagcccccaacgtccagccggaatacggtcgagaatttcggcgctacgttgtgcatcagcgcgcaattgctgggtattattcgtggacatatagcccggtgcgatggcgttcacattgatattgtgtttcgcccactcgttcgccatcagacgtgttattcccattacgccgcttttcgacgcggtataagacggaacgcgaatgccgccctggaaggagagcatagacgcgatattaataattttgccgccgttgccctgggcaataaaatgttttgccgccgcctgagacataaagaacacgctcttgatgttcaggttcataacgtcatcccagtctttttccgtgaaatcaatcgcatcttcacgacggatcaaacccgcgttattcaccagaatatcaatatgaccgtattccgccaccgcccgttccagtaatgccggaatgccatcgatttgacgcagatcggctgtcaggcttaaaaaacgacgtcccagagcggtgacgcgcgcaatagtttccgtcggttcaacaatgttaataccaacaatgtcacagcccgcttccgccagccctaacgccatcccctgccccaatccggtatcgcaccccgtcacaaccgcgactttaccttcaagagaaaatgcattcaaaatcattgttaatccttatttttgtcatgcctgtcacgcacaggcgttatcaccggtcgcgactagcgcagatcttgtaccgcaacgtgatccatgtcatcgaagacctgattttctcccaccatgccccaaacaaacgtataggctttggtgccaacgccggaatgtattgaccagcttggggaaataaccgcctgttcattacgcatcacaatatgacgggtttcctgaggctgccccatcatatggaaaacgcaactgtcctcttccatattgaaatagaggtacacttccatacggcgctcatgggtatggcatggcatggtgttccatagattgccgggcgccagttcggtgagtcccatactgagctgacaggtttccagtacatccggtacgaaatatttattgatagtgcgacggttactggtgaggttatcgcctaaggtgacgggcgcaacgtcggcaggcgacacttttttcgtcggataagcggtatgcgctggcgcgcagttgtaataaaacttcgccggtctgctcgcctcattgctgacgaagaccagctctttcgcccctttaccaatatacagagcatcacgatgaccaatgtcatggcgctgcccgtcaacgataatggcgcccgcgccgccaatattaatgacgcccagctcgcggcggtccagtaatcgggaaacgccaagctgtttacctacttctccgccgatttcaacgggatggctgacgggcataatgccgccgacaataatacggtcgatatggctgtagaccatcgtatattcatcagcgacaaaaatattttctattaaaaactcgcgtcgcagcgcctgggtgtccagcgttttagcgtgctcgctatggatactttgccttacgtccacttttccctccaatgataaatcgatcgcaatggcacaaaatcaaaacactgttttgatttatttaacggcatcatagtcgcctggataaaggttttcaacaataaataaaacaacgtttcatttatatggttggttatttttaaaactgctgtagcgatcacgatcggcgctaaaacttacgcatttgtctgattttcagacatgcgcgccagatgctgtatgcggttacccagataaaaattggagcttgttttagaacgaggtctgatgtgcgaattgaattaaaagcggtatgcgtctgcaatgcccgacgcggcaagacgttccgcgctataacgaaaaagggggttctgtcactggctttgccctcgtgatagagggctttttatgacggaatactgaaacaggaaaaggatggctggcgcaggatcagtcgcgttcaatggttaaagcaacgccctgaccgccaccgatacacagcgtcgccaggcctttacgcgcgtcgcgtttaaccatttcgtgcaccagtgaaaccagaattcgacagccggaagcgccaatgggatgccccagcgcaatcgcgccgccattaacgtttacccgtcgctcatcccattccagcatttttcctaccgataacgcctgggcggcaaacgcttcgttggcttcgataaggtcgacctccgtcagttgccagccggcacgctccagacagcgccgggtagcatataccggcgcaatccccattagcgcaggatcgacgccgacgctggcaaacgcgcggatgcgcgccagcaccggcagccccagcgcctgggctttcgcctcgctcatcatcatcaccgcggcggcgccatcgttgattgaggaggcattacccgccgtcaccgaacctaaactatcaaacgccggatgcagcagggctaacccctccgcactggcgtcggcccgcggttgttcatccgtatcgacaattgcggtctgcccattacgttgcgtgacgatggggacaatctcatctttaaaacgtccggtatcaatcgcggccctggctttttgctgcgaactgagcgcataagcatcctgtaactcgcggctgatgccatattcccgcgccaggttttctgccgtcacgccaatgtgataatcgttgaaggcatcccataagccatcatgtaccagactatccaccagattgtcggcatcaggcaacgcgccgctacggctgtcattgaggacatgcggcgcacggctcatattctcctgcccgcccgcaataacaatgtccgcttcgccgcactgaatagcctgcgtcgccaggtgcaacgcttttaaaccggaaccacaaacgtcattaatggtaatagcggaaacggtagtcggcagccctcctttgatggctgactggcgcgccggattctgcccggcgccagccgtcagtacctgaccgaggatgacctcatcgatagcgttagcgtccacgccggtgcgctcaattaacgcttttacgaccatgctccccagctcgacggcggaatgacgggccagcgttccctgaaaacagccgatgggtgtccgtaaagcccccactatcacaacctctttcattaccacctcagcgcaaaatgacaccgccatagtagagcattgttaaaattagttttcttgattgtttaaaaaaagtgagttttatcacaaaggaaatgacgctgatttgacggtgacgcagcttatttctgctgcaaatggtagcgaagccagttccccgccgttccgggcggcgttttcttgttccacagcaaatcaatagcaatcgccctcggccagccaggaacatccagctgcgccagcggtttttccgccgcaaactcttccaccagcgcgcagggcaatacgcaccagccaaatccctgaaccgccatgctcaacagtaataaatagtttggcgctgaccaggccgggccgcgcgtaatgttggcgttagagtcaagataggtattcagacgcagctcgcgccaggtatgcagttgctcccattgcaggttcgtctgtgacgccaacggatgcgtggtcgccacataaacccccatccagctttgaacaggcagacgcgccgcgccaatgtctgtgggatagtcatcacgcgcttcaatcaggcctatctgggcacgccctttttgcagcaggtcgatgacatcatcattttctccgatcaagcattcaaactcggtatgcggaaattgacgatcaaactgcgccattaactcttccagactgtcagggtgcagggtatcagagaggacgaacgtgagtcttgcctccgtctcgccggataacgtcagcgccacctcatccagacggtcgctcgccgataaaatagcctgaacatagctaagcacccgttttccttcttcggtcagaacgggctggcgcgaagatcgatcaaataatgaaaatcccagatccgcctccagatgcgcaatggcgatactaatggtggactggcttttacgcaggcggcgcgccgccgcagaaaacgaaccgcaagagacggtctcaacaaatgctattaaagcttcaggtgagtaacgcataacctatctactttatcgatggatgttatcttttaggtatcacattaaacgataaaatagcggaaatttctttagcttgattaagagtaaggttttttcgtttatgcaacatgacgccatacaacgtcgctcgctgccggagcgtattttccatgctgtctgttttgaaggtattgcgactgcgatactggcgccaacgaccgcctggctaatgcagcgctcggtgctggagatgggcggcctgacgatattgctggcaacgacggccatgatctggaatatcatttataacgctctgtttgatcgactgtggcccgcgcatcaggtgagacgaaccgccaaagtgcgcgcactccatgcgttaggatttgaaagtgggtttattgtcattggcgtcagtattgtcgcttgggtactgaatgtcagcctgctacaagcattcaccctggaaattggtttcttcctgttctttttgccgtacacgatgctgtacaactgggcatacgatgttttacgccaacgaatagtgactcgccgccaacagcgcgttagtgcatgatattgctcttttttgccgggatcgcaacgctcccggccctccgcctccacgacatccatctgcttaaaacgcccccaactgacgctatttatggtaaattgcgcttctttttgtgtgttttatagttgataaattcaaataatgtctaaaatttggtcaaaagatgagactctctggagttttgcattatacggaacggctgtaggcgcaggcactcttttccttcccatccagttgggatcggcaggcgcaatcgtgctatttattaccgcgctggtcgcctggcctctaacatactggccgcataaggcgctgtgtcagtttattctttcctcaaagacttctgccggtgagggaattactggcgccgttactcattattacggcaagaaaatcggcaatattattaccacgctttatttcattgcgttttttgtcgtggtattaatttatgctgtggcgattaccaattccctgacagagcaattagcgaagcatattcagatagatattcgcatccggatggcagttagcttcggcgtagtacttatcctgaatatgattttcttaatgggaagacatgccactcttcgcgtaatgggctttttagtctttccacttatcgcttacttcttgttcctttcgctctacttaaccggaagctggcaaccctcgttactgaccgggcagatgtctttggatagtcacacgttgcaccaggtatggatttctattccggtgatggtttttgcttttagccatacgcccattatttcgacgtttgccatcgacagacgggaaaattttggcgatcaggccatggataaatgcaaaaagatcatgaaggtcgcctatctgattatctgcctgagcgtgctgttctttgtctttagctgcctgctctccattccgccgtcatacattgaagacgcgcgcaacgaaggcgttaccatcctttccgcgctctcgatgatgcccaatgcgccggcctggctctctatttccggtattatcgttgccgtcgtggccatgtcgaaatctttcctcggcacctatttcggcgtcatcgagggcgcaaccgaaatggtaagaaccaccctacagcaggttggcgtaaaaaaaagccgggcgttcaatcgcgcgctgtctatcatgctggtttccgggattacgtttattatttgctgtattaacccgaatgccatctctatgatttatgctattagcggcccgctcattgcgatgattctgtttattatgcccacgttgtcaacgtacctgataccggcattgaaaccctaccgttcagtaggtaatttcattacgttggtcgtcggtttactttgcgtatcggtgatgtttttcggctaaagtaaaagatagccgggatataactcccggctattttatataagaatccagcacctttaatattacgtccagatcttcttcacgtctggcttcatcactctgatgaacgatatgctcggtcagatgacctttaatcacctcgcgcattaagccatttaccgcgccgcgaatcgccgcgatctgttgtaacacggccgcgcattcatgcggttcatccagcattttttttagcgctatcacctgtccctgaatcttgctggttctggctttaagcttttgtttgtcccggatggtatgtgacattacaacacctcactaacattaacgaatacaaattatagcattacgatgctactggggggtagtattctatactgggggggagtagaatgacgcccacataaaacaactaagaatcattctcatgggtgaattttcgacacttcttcagcaaggaaacggctggttcttcattcccagcgccattttattaggtattttgcacgggcttgaaccagggcactccaaaactatgatggcggcttttatcattgccattaaaggtacggttaaacaggccgtcatgctcggtctggcagcaacgctttctcataccgcgatcgtctggttaatcgcgctgggtgggatgtatcttagccgggcattcaccgcacaatcagtggaaccatggctgcagttaatttctgcgattattattctgagcaccgcgtgctggatgttctggcggacatggcgaggcgagcagcagtggctggcgggaaaccaccatcacgaccacgaccacgaccacgaccacgaccacgaccacgaccacgaccacgaccacgaccacgaccacgaccacgaccatcatggtcacatacatccggaaggtgcaacgtcaaaagcgtatcaggatgcccatgaacgcgcccatgctgccgatattcaacgccgttttgatggtcaaacagtgactaatggacagatcctgctattcggcctgaccggagggcttatcccctgtccggctgcgatcaccgttttactgatttgtatccagcttaaagcgtttacgctgggcgccacgatggtgctgagctttagtcttggcctggcattaacactggtgacggtaggcgtgggcgcggcgataagcgttcaacaggcagcaaagcgctggagtggtttttcgacgcttgcccggcgggcgccctatttttcgagcattctgattggtctggtcggcgtgtatatgggaattcatggctataccgggatcatgcagtaaatatgtaacgcttctgctcaggccgtatcattcacgtcgggtttcattccagaagcgtttttacttatcaaacggtatgaaaggccatacattcagcgtcccgcctgaattctgtattttactccactacaccacaggcaaaaaataccccaccgccaccgggtttagccggcgtgtcagtgtttctggatagggtcgccggaggcgggttattgcggagcgataaacggggttcgctgcagtgatttacaaaaccgggtaccaaacagcagttcccgtaatcggttccgcattcccagcttcaccagtaaccggtatttgtcctgccagatttgcttctcctgtgtattcagccttccacacaacgctgacaaccttcctcgtccacggtaaacttcctgaagcaagcgtaactgggccaggctcactccgcatgccagtatctcccggtgcatcaactgatccatatagttcatcaaccgcttcggattgttaaatatcggtggcacttccagaaagcccgtcaccggatccggagataacaaaaaggcgtccagcgctcctgtcctgcgcaggcgtgcgcccccggcccactgttcatcccgccgccaccgaataagtatctccgccagttcctgctccagcagcgccgggatgccgccgtataccttcagtaccacccggtcgctgaaaaacagctcatcgctgataatcataaccgggtagtccggcagtatctgtctcagggaatagaacaaaaagagatgttcacggggacgcagacacagtatcagtatggcctccggtttccgacgtaattgctgcaacagaacaggctgcctgtatgcggtttcacagttgcagcccggcataaatctccggaccaggtgtgccacggcgatcgtcaccggccagcagtcaccgtaaacgataatctgccaggccggtatccggttatgttccgtcatcctcatcctccttctttttcaggatcttccccgcatttctgttactgcacagccggttccacagttcatttgccatcgacctgtcaccattaccgacccggcgttttgataccagcggcggtccggctttttcacggcgcgtggacggggtgggactgtcaagaacccggataacataaatctcatagcgtcgtgctttattaggcagggtctggtgacggcagatgctgaccacccgcgatgttttgcttcgcagataggcaatcaggtagctggcccgtctggccgtgatgtgaaacgcctctgctatctggttacgctgaacccagttctgctgcaacaggcaccagtgtgccacaatgatatacaggggctcgccggcatactggcggacacttaccggaataaaacaggcatcatggttggtctgtccgggataatgaatatcgttaccaggggtaaggtactgcttttttgcgtgtgtattatcagggcacataaaacctctccataactgggtaaatgatttcccggaggtgaagaacaactcttaaatagtatttattattaatgtgtgtttattcgggattagttccccgataactcagtcagttcttttatttttattatctgcccccccgattagttataggtaacagtaacgggtattgcagcagaaaacgttcctgtctttacacttccccccggggtcggggttattactgcagtatataccttcgacacattaccggtgacagctcctgtaatagtaatatcccccagtacttcttgtttatcaaaagtaatctcttttcctttatcatcttttattgaaagccggagcccattaggctgacctttgttggggccatccaggctgacaagattcagagtttgcccggtatcctgtgtcagtgcacctttcccgaaggtgatggccagagggatcgtgaattcctgtcccatagccggtcgtaaaacctgcctggcgatcactgtaaaatttgcctgtctggtctgtgaaggttcataagtcgtataaatatgcccaaagttgacctgtaatggaacaatgtcaactttacccaatccgtttctgagaattctcacattaaaaccagataaaacaaatccgttttgtctcaaagaataagaaaaaggtacaatatttaaaacattacttatccccgtaaaagctgtaactgcactactctctgaatatgcttttgtatataagaaatccagtgttatccttacttttcgttctgtagtcccaacaggtagttttgtgccaaactcttttcgtaactcatttcctgactgagtactctttatttcatcccaggagaacgaaacaacacttgaagcatttcctgtttcttgaatggacattctgaatccaagtcccatcgcatctagtgtcttggtaaatttactgaagtagccctgattaaataccagctgtggaaattgcgtgtcatatcccatgtaacatttaaaaactgcatcctgattgattgtatagataaccgaatccgggccaggtttaaaatcatcggttgtcaaatttatacttcttaaattaatattctgaccggaagtgactgcacattcatttatacctagctcaaccgcatacactttagtcacacataaagagcacaacatcatcaccagcacggtcagttttgttttcagattaaaaatccattctgtcatgatgtcgcccctgcgtccttaaacgcgcagttcagggcatcgcaggtgtagcgattcatctgcagtcccccgtaatcatcaatataccccacccacagcgtccgggtttctgccggcagaacagcctttaaaggcaggttccccaggggcggcaccatcacgccctcgcggaaaccgctgagcctgtggctacggtctgctcccagccacgccacagtgatgtagtacggcgtcgggtttctgagggtcagatgtcccgcattccgctcagcagtcagctttctttccggctggtcactgctgcttctgataatggctttcggacggtaaaacagtttcagctggctctgcatggccagctgcaggacgttgtcgtcttccggcttcgggggaacgccccgcacgttaaaccagaacagtgtttccctgtcctgagggagcttatctgtcagcccgcgaacctgggtgatacggacctgggatttctgtccggcatcaatacgctgcagcggcggcagcgccatcagcgcatcggttctcaccccgtcagcatccgtcacccaggactgcgccaggaacggcgtggttttgtcatcgttattcagcgtgatggccaccgttttctgcggcgcatccatgataatacgggtccggtcaacattgacggccgccgggctgtactggctccatgccgccgccagtgcgagtaaaatcacacggcttcttctgctgtttttcacctgttttctcctttagacctgctctgtgacagggatatttttatctgcagggcagtaacagcggcccccggctgagtgtcaccgtttccggcagggtgagtctgcactgcacccggccatcccaggacacattcagggtccggcggtcttccccgctgagacctgtcaggtaggccagaccgccatctccgaccatccccgcggttctgccggttttccaggacaccaccagggcgccaaacggcggacttgcgccatcagccagccggatatgaccgagcacctgctccccctggttggcgtcaatcttccggtagcccaccgcgccctccgtcagcacctggctgatgacggagctgctgacgtccacgtcctccggcagggcggccacatcaaccgaaatatcgctgcggcgatagctgctgccggcgctcaccacgcccaccccgaagcggttggtcaccccgctgttgccgttcaccggcacaccggccacgtctccggtatctatcatcatgcggggctcattcccggccatcgactggctgaaagcggcaccgtgggcggtggcagtcaccgagccgtaccagctcaggcccaggctgcggtactgtccgggctgcagggtggcgtccgctgccgcttggccccacggcagacggctctgcacgctgccgctgaagctgctgttgctgccggtgtcataacggttatgaccggcgctgatgttccatgtagtgtccgggttatggaaatcgctgtaattcacggtctgctgcaggccgccccggttatctttctgtacgctgtaactcacctggcgactgtctccccacgggatactgatggtggcgtagacctggttctggctacccccgccggtgtactggttacgggcaaacgacaccgaggccgagagtccctgaaggtcgccgagactgaacaccttgttgaggctgagcatgtagttattgttggactgtgcgttccagtaattgagccggcttaccgagagggccgcgctcatgttgagtaccggaacggactggctataagtcacggtgtagctctgtttttcatgccatgcatcgccgccgtcagtggtccgacgctgcaggtactccggcatggacagaaaatggcggtccgagaagcggtatccgacgaacgccagggtactgccggttttatcaaacgttttggcatagttgatacggtagctgtaaccggactgcttctgcccatgcggcaaccgcgcatctgagcgggtgacgtccgcagacagagcgcccaacagccccatattctggccgatcccgagcgccgcggactggtagtcgccggtggaggcaatgaggccgccatacagcgacgtgttgttaaatgctccccaggtggcctccccgagcagaaagtcagggctgaccgtgctgttgttatgcgtcccgccgtacagcggacgtccggcggccaccttatagcgaacctgtccctggcgtgccataaaggggacgctggccgtgttgacctgccaggtccggacgctaccgtcgctttcccggacgctgacatccaggttgccgctgatattctggctcaggtcgggaagctcaaaaggccccggcgacacccgggtctggtacagaatgcgaccattctggctgacggtgacctgtgcattactgttcgcaatgccgctaattttcggggcatacccctgaagagagggcggcagcatgcgctcatcgctggccaaagtgagcccggcaaagcggaaggagtcaaaaatagcggagctgaggtacgtctgtccgagcgtcagttttgagcgcagtgctggcaaggcacggaacagatacgtctgcggcagataaaaatcggactgtgatgcgccctgcccactgtcaaaacggctgtactggtaatcgctccgcaatcgccaggcgccgagattaaacccggcggtgccgtagaggctgtagctggtagaggtttccccctgctgcggcatatagcggttgaccatcaggctgtaatcaagcaggccggcggtgacgccgtcgctccagcgtgaagggggcacccagtccgggtcctgataacgcatccaggcctggggaataatgaaggtcagacgctgattttcagcgctgtaccgtacctgactgtcagcggagcgcagctcaaggcattgcccgtccgggataccggtaacgggtttcaggccatgaataatcttatccttaagacccagcatggccaccatgtctgttgtcacacagatgacggccgcgtcgagtccggcaaccggtacaaccctgaccggatactgttcccgtaccggctggtcattgagccagatatcgagaatatagttaccgggcgccacatacccctcgcggctgaaggccgtgaggtccacgttagacaggttcccgctgtccagcaggctggcattgaactccgtggcctgcgacttcaggacggaaaatgtcagggtaatcagaatggcaagccgggtaattttcatggcatggcgctttcgtgttgtcgtccgtgtaacagacagcccgcaggcacagtcagatataaaagccgtccgatcccctccgtggacggcttctccctgtcgttatttaccgcgtgaaatcacaggtatttcagggtgtaggtgacggatgcgttaacatcgccaggagttgcggcatctgtcagggctatcaggcgggcaaagaagttgagttcgttattcccggcctgcagttgctgggcgtcgccatccggcatcggggtattgggtgtaatcagtgaggtgttgtcacctttcagaagctgcacaccaacatgctgggcactgccggtgctgacgtaagctttacctgaggtatctgctgtgccactgaaagagacggttactttagacattttccctgcggagccggctattgtagtttcattcggatcgaaggcgcagttctgcagatgaatggtgaacggttttgagtccgtggttgcattggcggtattcagtttacggtaagaaatctgtccaaacggaacggtgatcgcatcgtcgcccggtgcgatatcacagggtgagttggtgatggtaccagtgaaaagaattttacctgagccgaacgggcctgctgtgggtgtagtatcggcggcaaatacagaagcaccatacatcataccggcagccgccatggcaagtattattttattacgcatagataatatgtcctttgggtgaatgagaattattttgcaaaggctgaaaacaactctgagggtattaatgaaagcgttcagaaaagattcgtatgaataataaacgcctggtgttaaacgaagcacctgaactttccatcgaaaaatattgatttcagctaatgcctaatcagttgtaagaaaattcttattcaaattaaaacaataaaaatagatcgatacgatcgatgattatgatcgtaatttaagaataatcatcaaagaaatactttttaatgtaattataagcgggtgaatacctaacagacagatattcgcagcggacatgaaatattttgtaatatattatctggaatgtatgttttgcttttccattacactggatatttacaaaacataatactaatcatatataacaatgaaattactggtagcataaaaaactggatataatgcaagtaaaaggcatttaattccaaaacattaacttaataaatcattatgaaccatcataagtggaaggaataaaaaataataaatgaaatgatattcttctgtatttgtgatgggcatcacaatagatataaatgcaggtaccctgacatttctgaacttcgcggatgaaatttaaaaacaatgccgacagcaaagaacaaactggtaatagctgtcagacataatgctgcctgctgtaatgtatacagcaggctgggggatattaatgcgcggcgtcgtgctgcacggagtgcgtgggtgattcctgaactgactgagagtctacaactatgccatcctgagctgatttcagtaacagacctgcctgatagtattttccttcgttcatcaaggaaagcgctgtggtcacatccttacgggtttgctgaagaggaatgagttcctgattttcaataacactgacgcctgctagtttcagggcctctatagtcccttttttatctccttctttcattttctggtttgctttattaatagcatcatttttctggcccgcagggagataatcttctgctaccgtaatcgatgaatttatccgaatatagtggtctccttcaactggggcttttttatctgatttgacatacagattccagtcagtgctgtcatcgttcaggagtttttctgcttgcgcagccagttgttccgccttttgggtgcgaccattaaacaactcgaatcgcgacattccgatatcacgcatggcctgccaggcctgtccggatatcttgtcattattcagagtaacgttatcagtcatgtttgttgcggccataatatttcctgaaaacaggataaccatcagcgcaacgcctggcataatatggcttttcataatccatcatctccacaaagtaacattttttatcggattatcctattcagaaccggtaacccacgccaagattaaaaccattgctattaaggcttccgctgttatgggtagcatcaaaatccgctccctcataacccagagttatagcgacactactgaccggggtataagccacgccagcagaataaccatatccgaccttactgtcagactcatttatcccgtgatcacgctgatgcaataatacggggcccacttgactatacagacttaactggttatttattttccatgaggggcctgcaagcagggagtaataacgggttgttacacgaccattactgctttcatcggaatagcgctggcttccatttagccatgcaaatgaggttgtcagcccccagtccggtgacatttcatagttgtttgccagccgtaccccacgcaacgtcccggcgtgattagtatgggactgggcgtatccaagtgaaaatgtactggcattatcgtctgcccataccggactggctgcagcagacagcagaacaataccggtacttccggctaatagcattttgttcatcttcttctctccggttattttacctgatgccttactggcatgtattaagttaaaatctttccgtgataacaaactataaataaatcttttaaattatgagcactgttacgccagcaaataactttatctccggctgtcgggaggctattcacgaaaatatatccaggccagaaacagtatttaataataaataaactggaaaataaaaactgacaaaaatagaagttcactgatatataccaaaaataatttgagttgctgaaaggcggcaagggagtgagtccccgggagcatagataacgctgtgaccggggagagcaacaaatctgccgggagcagacttgaacgtcgcatgcgacggcccgtcagggcgaggcccatggatggactgagtaatccgtagctaacacataagccacttgaagtatgaagggtatataacgggaaagaaggcctatcggcctggtaaatcaacgtctgtgatttaagttgcaggaaacggctatggagagggggatgcggcagttatcgggcagtaacggcattgttcagtgagtatccaggaaacaaaataaatatcctccggcatagccggaggtttttcagatgcgcctataaggctctcttaccagccgcgccctaacaggcgcatacgatctgacatttgcatcaaacttcgttacttacggcccgtaaacgggctgcccggatacgggatcgataattgctcacccattttatcctcttcaagctggtgctttatgtagtcctgtatcttcgccgtgttcttacccaccgtatcgacatagtaccctctgcaccagaactccctgttcctgtatttgaattttagatccccaaactgctcgtaaagcatcagactacttttacccttcagatatcccatgaaactcgacacactcatcttcggcgggatctccagaagcatgtgaatatgatctgcacaacattctgcttccagaattcgtacgtttttccattcacacaattttcttaatatgctgcctactgccctacgcttctctccatagaacgcttgtcttcggtatttgggcgcgaaaactatgtgatatttacagttccatcgggtgtgcgctaagctcttttcgtcccccattgggacccccttttgatttcttgttgaacttttgcagttgccagaccgcaagatgttttaacaaatcaaaaggggttttaataactggcttaaagctgaaagctttccggaacccccagcctagctgggggttttccatagacaaaaaagaagggagcggtactcccttcgtaaacatgtcagaatacgacattttggtactcttttatttattatctggccgtaaaagttatgctgttggcagatatctccagtcaacataaaaaaataccaccagctaaaaatgtgatgcaaaccaccattaagcaggtaaccaaattgactgtgccactaaatccggaaaagagtttgaatccggggataacatctgatgcagaaattagcaccagtcttcgattcggatacccggaatgcgttcaaattcgcggagattgtttgtgacgacgaccagtccgcggctaccggcatggccagcaatcatctggtcataaggcccgacaggtgttcccttgcgggccagttcggcacggatttgaccggtatgtatcgctgcctgtgtatcgtaatccaaaacctcaaggcgggagataaatccctccacgacggcaagattacgctccggcgccaggcttttttcagcaccgtaaatcagctccattaaggtgatggagctgatacacattcgggatgtattgaggttgaagcgttctctgatgtgttcgggcttatttttgatggtgaaaatacaggtattggtatcaagcatgaatttcagcatcaaaatccttcccgttcctgtactgcgggttgttctctggtactcataaaatcagtactggcgccttcgccatcgaaccagctgtcccaggattctccgactggagtaatgattctgcttctgccaaccgcaatgatttcgacatgtttcacatcctccggaaaggatatcgatttaggcaatctgactgcctgggtccggttactaaaaaaaagtgttgtgtgcataactgcctcctttctggatatacaacgcgtatatccattatgagtagaggcgatgtatatgtcaaagagatatacaggaaaaaataatccagtcacatgacgcgcactccgcagggcatccttgtccgactccggcatttctgaatacatccaatgaaggaaataccatgcaaacaatgcataaaaaacatatgtgcccatggcttctgcccggtttgctcggtctggctcggtgtgcgccagtaccgcatacttacgcagccatcattgaggcaggattttatccggaaggtacagatctccagcttgttcttaagataattgagaccgcgcgacaggaaatccgtctgatggactattccttcacctcttgggaggtggtccggttcgaacattcagtgagtacaaaattctccatgtcaaagtgatcgtcagcgacgaccgccacaccgaggtggacgcgtcagaatcgctgatcggacacgtcgcaatctacactctgacttataagccagcctgaaggggcatgttggctttgacgatcaggcaaaaaacaacggcgaataaagtcgtatgatgatcttcacatttatcatcatcagcgttcatattactcaacctgtaatcaacctctggcgtttttctgtatccatcacaaccatttccggtaaaggtaaaaaagggatttgaacctttccggagatgataatgaaggtaaatgcatggacaattttgcttatgtcggcgcatctgacggcctgtgccgtccctggcacagaaaaatatcagaccagcatggacagcgttacggcagaaaaaataagccggattatccagtcggatgtcattccttataaaggcgaaaaccatggagaagttatcagccgcgtatcgtctgcttttctcggaacaccttatcaggcggatacgctcatcggtgggcccggcatccccgaagtccttgtagcgaatttcaacggcgtggactgctttaccctggctgattacgttgaagccctggcccgcagcgataatcagaaatcgtttctgcataatcttgccaggactcgctacgccgcgggcaaagttgcttatctcagccgccggcacttcttctctgactggttcgccgcagcaccgcgtaatgcacgggatgtaacgccggatatcagccctgattatgtcgttgttgacaagcagcttaaccataaacctgatggcggcgagtacattcctggtctgggcatccatcctcgtaaaataaattacattcccggaagagccatcaaccagcaggtcatgaaccacctaaaaaacggggattatatcggtgtctactccccgcttgacgggctggacgtttcacatgtgggtatcgtagttcgccatgatgaacaggtgtggttcaggaacgcctcctcattggccgcaaacagaaaagtggtggacacaccgtttatggaatacatgcattccagaccgggcatcgttgtgctgcgggctgaatgataaagtcattaccggagtcgccagctgataatagccgtccgacataggtattgaaaccctgtgtactgtggggccgacacggaaaattgctgtaaattcgtggatttagtaaatactagaagatatttgtctggagcgggcgaagggaatcgaaccctcgtatagagcttgggaagctctcgttctaccattgaactacgcccgctttgagatgcgtaaagcattataaaccttacgctctggttggcaagagacttactggctgactggcgattaattcgccgtcagcacttcggtttactcccctgcggcggcagataacgcagcggatcgatggccgtcgcccggtagcgaatctggaagtgtagtcttacggatgcggcatccgtgctgcccatcgtagcgattttttgccccgctttaacgctttgtccattattaaccagcatggtgtcattatgagcgtaagccgtaatgtaatcttcattgtgcttaatcatgatgagattgccgtaaccgcgcagctggttcccgacatagacaactttacccgctcccgccgcataaacaggcgttccgcgcgcgcccgcaatatcgatccccttatttccgccctccgcggtggaataaggtaaaatcactttaccgttagcaggccatacccaacaacgctgccccaccggcggccaggaggattttggcaccgaagatgacggtctgaccgcagcagtttttgttgctgttttattgctggttttgcgtgttgaagtgctactctttgcgctgccgcgcactttaattcgctgccccacctcaatagtataaggcggagaaatgccattcagtcgggccagttctttcacgctggttcccgtagcgcgcgatatacgatacaacgtatcgccgcgcttaacggtatagacggagccggaatacgttcctgagccggaattactggaacaccccgccagcagcagccctgtgcataacagcaccgcaatacccaggctatttttgttcaggcgtcctgcgctcaaaaccattcctcactctattgacagacgccttatgatagcagccaaatgccgtatgcccaatccattgacgccggaaaggggccgcgtggatgatgatgccgcgaatatccgatatgccagcataatatcgactcacggcacaatggcgctcgtctgcgttctgtcagggcctgttttggtaatgcctttctttctgttatgcgctacgctgatcgtctgagtatatggcctggccatgctgccgggtcattttaattttcaggagctttcatgactgaggaacatgtcgttttattggatgagcaggataagccttccggcacactggaaaagtatgcggctcatacgcttaatacgcctttgcatctggctttctcctgctggctatttaacgaagatggtcagttgctggtaacacgacggtcgctgagcaagaaagcctggccaggcgtgtggacgaattcggtttgcggtcatccgcaacaaggcgaaaccaccgaagaggcgatcatccgccgttgtcggttcgaactcggcgtggaaattaccgatctcacccccgtctatccgcacttcagctatcgagcgacagatccaaacggtattgtggaaaatgaagtctgtccggtatttgccgcgcgggcaaccagtgtgttacaggttaacagcgaagaggtgatggactatcagtggagcgaatttaaaagcgtatggaaaagccttctcgctacgccgtgggcatttagcccgtggatggtcatgcaagcgtcagacgaacaagcgcgtgaacgactgctcaattactgccagcgttaaagattgcctgatggcgctacgcctgaacgaagagatgccggatggcggctgatgccccatccggcaatttacatcttatttcaccggacgcatcgccgggaacagaataacgtcgcgaatcgtgtggctgttagtaaacagcatcaccatacggtcgataccaattcccagacccgctgtcggcggtaaaccgtgttccagcgccgtcacgtagtcttcgtcgtagaacatggcttcgtcgtcgcccgccgcttttgcattaacctgatccaggaaacgctgcgcctggtcttccgcatcgttcaactcgctaaagccattgccgatttcacgaccgccgataaagaactcgaagcggtcagtgatttccgggttcacatcattacgacgcgccagtggagacacttcagccggatattcggtgatgaaggtcggctgaatcagatgcgcttcagcgacttcgtcaaagatctcggtgacgatacggcccagaccccagctcttctcgacgtgaatgccgatgctttcagcaatcgccttcgcggaatcgaagttgtccagatcagccatatctgtttccggacgatatttcttgatcgcttcacgcatggtcagtttttcgaacggcttaccgaagtcaaacacttcatcaccgtacggaacctgggtggtgcccagaacatcctgcgccagcgtacggaacagagactccgtcagctcgatcaggtctttgtagtccgcatacgccatatagagttccatcatggtgaactcaggattatggcgcacggagatgccttcgttacggaagttacggttaatttcgaatacgcgttcgaagccgccaaccaccagacgcttgaggtacagttccggcgcgatacgcaggtacatgtccagatccagcgcgttgtgatgggtgataaacggacgggcagacgcgccgcctgggatcacctgcatcatcggcgtttcgacttccataaagccgcgagcaaccataaactggcgaataccggccaggatcttcgaacgggttttgaaggtgttacgggattcatcgttagagatgagatccagataacgctggcgatagcgcgcttcctggtcctgcaggccgtggaatttatccggcaacggacgcagcgctttcgtcagcaggcgcagttcggtgcagtggatagacagctcgccggttttggttttgaacagcttacctttcgcgccgaggatatcgccaagatcccacttcttgaactgctcgttgtaaacgccttccggcagatcatcgcgcgccacatacagctgaatgcggccgcctacgtcttgcagggtaacaaaagaggctttacccataatacggcgagtcatcatacggcccgcgacggacacttcaatattcagcgcttccagttcttcagcttctttcgcgtcaaactctgcgtgcagttggtctgaggtacggtcacgacggaaatcgttcgggaacgggataccctgctcacgcagtgcagccagcttctcgcgacgtgccttcatttcattgttaagatcgactacctcgtcagcgccctgtgcgttttgttcagacatgttgattcctcatagccctgctttcaaacttgcttcgataaattgatccagactaccgtccagtaccgcctgtgtattgcgggtttccaccccagtacgcaggtctttaatgcgggaatcgtccaggacataggaacgaatctggcttccccagccgatatcggacttagtgtcttccatcgcctgtttttcagcgttctttttctgcatctccagttcataaagcttcgctttcatctgcttcatggcctggtctttgtttttgtgctgcgaacggtcgttctggcactgcgtcacgattccggttggaatatgggtgatacgcacggcggattccgtacggttaacgtgctgaccgcctgcgccagacgcgcgatagacgtcgatacgcagatccgccgggttaatgtcgatatcgatatcgtcgtccacttccgggtacacaaacgcggagctaaacgaggtatgacggcgaccgccggagtcaaacgggcttttacgcaccagacgatgtacgccggtttcagtgcgcagccagccataggcatattcgccggagattttgatagtcgcggacttaataccggcgacttccccttccgattcttcaatgacttctgtcttgaagccgcgcgcttccgcccaacgcagatacatacgcagcaacatgctggcccagtcctgcgcttcagtaccaccggaaccggcctgaatatcgagatagcaatcggcgctatcgtactcgccggagaacatccggcggaattccaactgcgccaacttctcttccagcgtattcagttccgcgacggcttcgttaaacgtctcttcgtcgtcagcttctaccgccagttccagcagcccggaaacgtcgtccagcccctgagtcatttgatcaagcgtatcgacgatcgcttcgagcgatgaacgctcttttcccagcgcctgcgcgcgctcaggttcgttccagacatccggctgttccagctcggcgtttacttcttccagacgctctttcttagcatcgtagtcaaagataccccctaagaacgttggtgcgttccgtgaggtcctgaatgcggttattcaccgggttaatttcaaacatggtctgatttcttttatttgacttgtcaaaatgcggttataagggcgaaatattagcggatttcgccccttaattacagcgaaagtgttgttaaatcgccccgatcatagcggccaaatatcatcgataataatctgtaaactacggttgccgcgaaactcgttaatgtccagtttataagccagttctacctcccgcacgccgttatccggccaacaggtcgtatcaatattaaatgcgatgccatccaacagcgggccgccgccgacaggctccaccatcaccttgaggtgacgctcgcccaccagacgctgctgtagcagacggaaacgaccatcgaataacggttccgggaacatttgcccccacggtccggcatcccgcaacagttgcgccacttccatagacatctccgccgcgcttaatggaccatcggagatcacctcgccttgcaacagggcaggatcgagccattccgtcaccagctcgccaaaccgttgctgaaactgctcgaatttatgctcttccagcgacaatcccgccgccatcgcatgaccgccgaacttgatcatcagatcagggtaaagggtatccagcctttccagcgcatcgcgcatatgcagcccctgaatcgaacggcctgagccttttagcgtgccgtcgcccgcaggcgcaaaggcgatcaccgggcggtgaaaacgctctttaatgcgcgacgccagaattccgaccacgccctgatgccattcaggatgatacatcgccagaccgcccggaagcgtttcactactgcgctcaagcttttcgcacaggataagcgcttccgcctgcatcccctgctctatttctttgcgcgtctggttaagcgcatccagctcgctggccagaacacgcgcttcgccgaggttatcgcacaacagtaacgccacgccaacggacatatcatccagcctgccggcggcattcaggcgaggccccaacgcgaagcctaaatcactggcggcaagctgctgcggatcgcgattcgatatctccagcaacgctttaattcccggacggcatttcccggcacgaatacgacttagcccttgccaggtcagaatacggttgttagcgtccagcggcacaacgtctgctaccgtacccaacgccactaaatccagcagctccgccagattcggcggcgcgatgttgcgctcgtcgaaccatcctttgtcgcgcaaaaatgttcgcaacgccagcatcaggtaaaacgccacgccgacgcccgccagcgacttagacgggaattcgcagtcgcgcagattgggattaataatcgcttcggcatccggcaacgtgtcgcctggcaggtggtgatcggtcacgatcaccggaatccccaacgtctttgcatgcgctacgccggcgtgggatgaaatgccgttgtctacggtgacgataagctgcgcgccgcgcgccttcgcctgatcgaccacttccgggcttaaaccgtagccgtcttcaaagcgattaggcaccagataactgatgttgtcacatcccaacgcacgcattcccaatacgcttagcgcagtactggtcgcgccgtcggcgtcaaaatcgccaacaacaataatgcgggtaccttcgcgaaaggcgttgtagaggatctccaccgcgttatctatgccgctaagctgttgccagggcagcattcctttcacgctgcgctccagttcgcgggcgctacgaacgccccggctggcatataaacgtcgtagtaatggaggaagatcggcggggagttccgccgtctcatcagcctcgcgccgacgaagttgtctctgttgtttcacgcgtattatttaccactggtctgtttttgatgctcatcaagaaacgctttcatctctttcggtccctgatagccaggcaccacatagccgttactcaatacaatggctggcgtaccgctaacgcccaactgcacgcccaacgcataatgatcagcaatgttcacgtcacagcttgccggtttcacgcccttacctgccatggcgtcatcaaacgctttgtttttgtctttggcgcaccagatagatttcatatcctgctccgcctggctttccagcccctggcgcggaaaagccagataacgtaccgtgatccccagcgcgttataatctttcatctcttcatgtagcttatgacaatagccgcaggtgatatcggtaaaaacagtaatgacatgtttctcatccggcgctttatagacgatcatctctttttccagcgcatttagctggctcatcagcagtttgttcgtcacgtttaccggatgcgcgccgctcacgtcatacatcggcccttgaataatatgtttgccgtcatcagtgacgtacagtacgccgctgtgagtgaggacggttttcatccctgccactggcgaggcctgaatttccgtactctgaacgcccagcttagccagcgactgacggatagccgcatcatccgcatgggccacgcctgaaaacaccgccgccagtaaagtgaacatcataaaacgctttttcataaactatcctttcctgtcagcactcatgcccgcggatggtgctgttgatgaagttgacgcaaacgctccgttgcgacatgcgtataaatttgtgtcgtcgaaagatcgctatgcccaagtagcatttgtacaacgcgcaagtcggcgccgtgattcagcaaatgcgtggcgaaagcgtgacgtaaaacatgcggcgatagtttttcgctatcgattccagccagtaccgcataatgtttaatacggtgccagaaggtctgccgcgtcatctgctgcgcacgctggctggggaataatacgtcaatcgatacgccattgagtaaccatggacgcccatgctccagatacgtttccagccaatataccgcctcttcacctaacggcaccaaccgctctttattgcctttaccgataacccgcaccacgccctgccgcagactgatatcgctcattgtcagccccaccagttccgacacgcgcaaaccggtggcatacagcacttccaacatagctttatcgcgcagctccaaaggttgatcaataagcggcgcctgcaagagccgttcaacctgcgcctcgctaagatctttcggtaaacgctgcggaagcttaggcgaggccaactgcgcgctcggatcatcctcacgatacttttcacggtacagatgctggaaaaagcgccgcatagcgcttaacaggcgtgcggagctggtcgctttgtatccgccctccacacgttcagccaatagcgtttgtaaatcatcagcctgcgccgtcgcaagcgtttttccgcgatgatgcaaccacgcaacgaccatcgataaatcgcgacgatacgcgcttaatgtattttccgccagatttcgttccagccacagggcatccagaaactgctcaatacgcgctaaatcctgttccattcgcgctccctacttcacgcttacttttggtgcattatgcctcattgtgccgtgaatgcagcgattctgttacactacccgcaacgctatagcagaatcgagatgtaacgtaatgaacatgggtcttttttacggttccagcacgtgctacaccgagatggccgcagagaaaattcgcgatatcctcggcccggagctggtgacattacataacctcaaggatgacgcccccgccttaatggagcagtacgacgtgctcattttaggcatccccacctgggattttggtgaaattcaggaggactgggaagccgtctgggagcaactggacgatctcaatctggaaggcaaaatcgttgcgctttacggtatgggcgaccagctcggctacggtgagtggttcctggatgcgctgggtatgttgcatgacaaacttgccctcaaaggcgttaaatttgtcggctactggcccacagaaggctacgaatttaccagcaataaaccggtcattgcggatgggcaactgtttgtcggcctggcgctggatgaaacgaaccagtacgatctcagcgatgagcgtatacagacctggtgtgaacaaattctcggcgaaatggccgaacactacgcctgaaaccttactcgctgtacttccctctcgacggaaccgcgtttacgccgttccgttagtgttggcctgatatcggctgctgtaacagtatccgacgcaactcacgccattccgcttcttccatgctatccgccgccagccataaatgctgatgacgtccagactctgcgcgtaaacgcaacaccatcccgctcttcagtaaccagggcggacgcaagagcgtccagtcctgcccctgccagcgtaagcgcccgtccatgagtagcttgatctctccctggcaggtattaatcctgcgctggctacgtacacagtcaaacacgaccagcgacagtagtatcatccataacggggtataactcagcggccagggcatcaataaaatcaccgcggcaaccagcccatgaatgagcaatgagatccactgagcgcgccatgagacgcgtaaatcagattgccacaggaccacgttcccgattccgtgtctgaatgagtcggaccatctgttccagttcagcgtcagccggtttaccgtgattcattaaccagttaaataaatccgggtcatcactctgcaacaaacggacaaaaatacgcttttcttcatcacttaaactatcgtactcatgttcaaaaaacggcatgatggaaatatcaagttcgcgcataccgcgacgacatgcccagtgaatacgtgctttattgtgaatatccatgttcttcctgcctcgcgaaaatgaagtaccgggctattgtaacgtgtttttggcgttgttttacgggaatctcagtaatctggaacgcgatcgcgaaataaaaggctgggaatcaatatgttcatccattttggataccgcctcgcaaaacgatcaatccgctctcaatgggctatttaaagcacttgcaatgaccgatggctcttttaccattaaccattattgttgcagctaaccaggacattatttatggcttttatctcctttccaccacgtcatccttcatcgtcagcccgcctgccgctgacgctgatcgcgcttgacgactgggcgctgtcgaccattaccggcgtagacagtgaaaagtatattcagggccaggtcaccgctgacgtaagccagatgactgaacagcaacaccttctcgccgcccactgcgatgctaaaggtaagatgtggagcactctgcgcctgttccgtgagcgcgacggtttcgcctggattgaacgccgtagcgtgcttgaagcgcaattaacggagctgaaaaagtacgccgtattttccaaagtggtcatcgcgccggatgacgaacgcgtattgcttggcgtggccggttttcaggcccgcgcggcgctggctaatgtctttagcgaactgcccaatagcgaaaatcaggtggtcagagacggcgcctccacgctgctatggtttgaacatcctgcggaacgattcctgcttgtcaccgatgtcgcgacggccaacatgttaacggagaagttgcatggcgaagccgaactgaataacagccaacagtggctggcgttggatattgaagcaggcattccggtgattgacgcggcgaacagcggtcagtttatcccccaggcgactaacctacaggcgctgggcggcatcagcttcaagaaaggctgctacaccggacaggagatggtcgcacgggcaaaattccgcggcgccaataaacgcgcgctttggttgctggcgggcaaagccagccgggtaccggaagcaggagaagatctggagctacagatgggcgagaactggcgtcgtaccggcgctattctggcggcgacgcagttggacgatggtcagttactggttcaggccgtcatgaataacgatttagaagccgaaagcgtcttccgcgttcgcgacgatgccaacaccctgcatatcgtcccgctgccctactcgctggaagagtgatatcacgttaaaagccggatagcctgatagcgcaacgccatcaggctcgcacgtgctgttctcgtaggccggataaggtgcgacagcgccgccatccggcacgggcatccgggaattatgcctgtcccacatacaaatagatggccaggaagtggcacacgctgccacccagcacaaagccatgccagatggcgtggttataaggtatgcgtttgcaaacatagaaaattacgcccagcgagtaaacgacgccacctaccgccagcagcgtcacgccgcctatcgccagcttaatcgccaactgataaaccactatcagcgacagccagcccattgccagatacgtaaccagcgaaagcactttaaatcggtgcgcaatcgtcaacttgaagaggataccgaatagcgccaggctccagatcacaatcattagtccgcgcgccagcggcgaatccagacctaccagcagaaatggcgtataggttccggcaatgagcagatagatagcgcagtgatcaaatttctttaaccagatttttgcccgctgatgaggaatggcatgataaagcgttgaggcaagaaaaagcaggatcatgctcccgccatataaactgtagctggcgatagccgtcatacccgcattcgcctctaccgcctgaaccaacaacagcaccaggccgacaataccaaataccaatccaatgccgtggctaatactgttggcgatttcctcagccagcgaatatccctgcgtcattaatggtttttgcaccataacttactccggagaaacgttcataacgatgaactgcgcctctagcgtaactgagaatggttccagtgaacacatgttagctaaaataaattcgcaaaattaaattttgtttattattcaataagttaattacaaaaactcaactaacacgcgttcatatttatcaaaggcatttaaaatcaatcacataaaattgcgtctggttgggatagatttcagcaatgacccgtttcagctcatcaagcgacatattttcctgttgcgcatgtttttcgttcagcgtatccagcgtcacagttgacgttcctgtcacttcgattgtgcaaaaatagccatcatcttcgaaccgccccacgcgtagcacatcgcctgctttaaagtgggactcggaggcatcacgaatagtgatggttttacgccctgccagaatgtcattctggaaacgttgaaagaaagtaatgtcgtttggctgcatgtggttatccccctgaatatggccccttgaagtggatgttacgatctgaatgtgttcttgctccgacacgcgagcatcctggaattttgcgtacgctttacatgccacttggtgcagaatgaatgataacagactaaataaattgagattatgcaacaatgagaaaactcaccttgccaaaagattttttatggggcggcgcggttgctgcacaccaggttgaaggcggctggaataaagacggtaaaggccccagcatctgcgacgtgctaaccggcggcgcacacggcgtgccacgcgaaatcacccagaatgtcgttgctggcaaatactatccgaaccacgaggcggtggatttttacggacattacaaagaagacatccgtcttttcgccgaaatggggttcaaatgcttccgtacctctattgcctggacgcgtatcttcccgaatggcgacgaatcccagccaaacgaggccggtctgaaattctacgacgacatgtttgatgagttactcaaatacaacatcgaaccggtcattaccctttctcactttgaaatgccattacatctggtacagcactacggcggctggaccaatcgtaaagtggttgatttctttgtccgttttgctgaagtcgtgtttgaacgctacaaacataaggtcaaatactggatgaccttcaacgaaattaacaaccagcgaaactggcgcgcgccgctgtttggctactgctgttccggcgtggtgtataccgagcatgagaatccagaagaaaccatgtatcaggtcttacatcatcagtttgtcgccagcgcgctggcggtaaaagcggcacgtcgcattaacccacagatgaaagttggctgtatgctggcgatggtcgcgctgtatcctttctcctgtaaaccagaagatgtgatgtttgctcaggagtcgatgcgtgaacgctacgtctttaccgatgtgcagctgcgcggctattacccgtcctatgtgttgaacgagtgggagcgccgcggatttaacatcaaaatggaagatggcgatcttgaagtgctgcgcgaaggcacctgcgattatcttggtttcagttattacatgaccaacgcggtcaaagccgaaggcggtagcggcgatgcgatttccggttttgaaggcagcgtaccgaacccctatgttaaagcatctgactggggctggcagattgacccggtgggcctgcgttattcattgtgtgaactgtacgaacgctatcaaaagccgctgtttattgtcgaaaacggttttggtgcttacgacaaagtagaagaagatggcagcatcaacgacgactaccgaattgactacctgcgcgcccatattgaagagatgaaaaaagcggtgacttacgatggtgtcgacctgatgggctacacgccgtggggctgcatcgactgcgtgtcgttcaccaccggtcagtacagcaagcgctacggcttcatctacgtgaacaagcacgatgacggtacgggcgatatgtcgcgttcgcgtaagaagagcttcaactggtacaaagaggtgattgccagcaacggcgagaagctttaactcctgcacgttacccgccagtcggcgggtaacactttgaacgagtcttaccaggtcttacctattttaaattcccagcgtacatcttccattttggttggcgacttcgcttcctgcattaccgggaagaaggctccggcaccaaaccataatttcagtgaatcgacggcaatattaaatgacggaccaacaacccattcggtagttccagaatggttattaattacgctgccattagacagttttttcgttccagaggcattattgctgtaggcactttccagaccaagatccagcggtaaatcgctaaacatataccgcacctgggtattccactggaattcgttacctcgtttcacgtcctggttaccgcgctcaaatggtccctgatatacaaaacccatatcccctttaatgttaggagtaaataattttgttaaagtgagtgttactcttcctccccaggcgctattcccaggcaaatgattatctccatcttgcccggtgggtagtaatactgccccacctaccgtaacccaaaacggatcacctcttcgctggctcattaaagcataattgacccccaccgattggtcgcccattccctctatgtgctcaggagacagattgtctcgtttgttattgatataggaacccacagttgataattccagtctgtcggtcaaaccgtaacgaatcttcaataaccatatctgggagtaaacatccggacttccatgcccctcgatttgatgatctttatcgcgaaatgagctattcatggcggttaataactttccttccggcaatactgaaccaccagaaatagcggtattaactggtgcacctaatagattactgggattattttctccgttagctgccattgcattcattaatagaaaatatgtcattaatggcagaaatataaatcgtttcattattccctccaggtataaaaaacaaagtgctaagttaataaatatttacgttatttatgcttatctttaatttataatttaaattaataacttgatgaatttaatatacggaaatttttgtaactatattgagaggtaaataacgattccggagagaaactatttgtaaccacatgtaaatataccgtgttatttttattaaataacagcaaggtaaaaatgatgcacaatgaatcattagactctaaaaaaccggtaatttaattctggctaatacactgatacaaacgccaggttgcctgacaggagccaacgatttactgtaatatattgaattagtaacactttgtagcctgaataaggcgctcacactgcatccgacacaaacaaagcgcattttattaacaagctgaaaaggcgccgaagcgcctttagaagacagtcgaatcagtaaattactggtagtcgctaatcggtacgcaggagcagaacaggttgcggtcaccataaacatcatccagacgtttcaccgtcggccagtatttgtctgccacgcctgccgggaatacggcaacttcacggctgtacggatgcgcccactcggcgaccagttcgctctgaatgtgcggcgcgttcaccagcgggttatcttccagcggccagacacccgctttcacctggtcaatctctgcgcgaatagccagcatcgcatcgataaagcgatccagctcggccttaccttcagattccgtcggctctaccatcagcgtgcccgccaccgggaacgacatggttggcgcatggaaaccatagtcgatcagacgcttggcaatatccagctcgctgatgccggtttcttctttcaatgggcgaatatcaagaatacattcgtgcgccacacggccatcgcgaccggtatacagtaccggataggcatctttcagacggctggcaatgtagttagcgttaagaatcgcgacctgacttgcctgcttcaggccttctgcgcccatcatgcggatgtacatccagctgattggcagaatggaggcgctgccgaacggcgccgcagacaccgcgccctgacgggtgagcatcccttcaatttgcaccacgctatgacccggtacgaacggtgccagatgcgctttcacgccgatcggtcccatgcctgggccaccgccgccgtgcggaatgcagaaagttttatgcaggttaagatgcgaaacgtccgcgccaataaagcccggtgaggtaatgccgacctgagcgttcatgttcgcgccgtcaaggtaaacctgaccgccgaactggtgcacaacttcacacacctcacggatcgtttcttcatacacgccgtgggtggacggataggtcaccatgatgcaagaaaggttcgcagcatgttgttctgcttttgcccgcagatcgtccaggtcgatgttgccgttcttatcacaggcgactaccaccacctgcattcctgccatatgtgcagaagcagggttagtgccgtgagcagaggccggaatcaggcagatatcgcgatgaccttcgttgcggctttcgtgatagtgacgaatcgccagcagccccgcgtattccccctgtgcgccggagttaggctgcatacagacggcgtcgtacccggtgagtttcaccagccagtcagaaagctggctaatcatctgatgatatccttcggcctgttccggcgggcagaacggatgcagttcagcgaattccggccaggtgataggaatcatctcggcggcggcgttcagcttcatggtgcaggaacccagcgggatcatcgcctggttcagcgccagatctttacgctccagcgagtgcatatagcgcatcatctcggtttcgctgtggtaacggttaaataccggatgcgtcagaatcgcatcgtcacgcagcatactttgctgaatggaacggctatcaagcgccacgtctttatccagtgtttcaatgttcagaccgtggctgtcgcccagcaaaacattgaacaactgcgccacattctcacgggtggtggtttcatcgagcgtaatacccaccgcgttatgaatatcgctgcgcagattgatctctgccgcttccgcacgcgccagtaccgcagctttatcagccacttccacacacagggtgtcgaagtagtgcgcatgacgcagctttaagcctttctgttgcagacctgccgccagaatatcggtcaggcggtggatacgattcgcaatgcgcttcagaccgaccggaccatgataaacggcatacagactggcgatgttagccagcagtacctgcgaggtacaaatgttggagttcgctttctcacggcggatatgctgctcgcgagtctgcatcgccatgcgcagtgcggtattgcccgccgcatcttttgagacgccgataatacggcctggcatggagcgtttaaattcgtctttggcggcaaagaacgccgcatgcgggccaccgtaccccatcggtacgccgaagcgttgcgcagagccgaaaacaatgtccgcgccctgtttgcccggagccgtcagcagcaccagcgccataaaatcggcggcgacgctgaccacaactttacgggatttcagctcagtaatcagtgcgctgtagtcgtgaatttcgcccgtggtgcctacctgttgtaacagcacgccaaacacatcctggtgatccagtgctttcgccgcgtcatccacaatgacgtcaaagccaaaggtttcggcgcgagtacgcacgacgtccagagtttgcggatggacatcagaggcgacaaagaaccggttggcatttttcagtttgctgacgcgctttgccatcgccatcgcttcagcggcggcggtcgcttcatccagcagcgaggcggaagccatgtccagccctgtcaggtccagcgtcacctgttggaagttgagcagcgcttccagacgcccctgagagacttccggctgataaggagtgtaggcggtgtaccagcctggattttccagcatgttgcgcaggataaccggcggtagctgcacggcggtgtagcccatgccaatgtacgacgtgaagcgcttgttacgcccggcgatggcttttaattccgccagtgcggcatattcggttgccgcctctccaacctgcggcggagtcgcgagctgaatgtctttcggcacaatctgacctgtcagcgcgtttaacgactcggcgccaaccgcattcagcatctcttgttgctgtgcggcgtccggtccgatgtggcgttcaatgaaagcgccgcggttttcaagctggcttaacgtctgtgtcatgggcgatggttcctgaaacgtgcagtgaatcgtgattgtctctaactcaattgcccggtggcgctgacgcttaccgggcctacgcgtgcgaaaacgaatacgcaaaatcattcgcgttgcagtgagtaggccggataagcattagcgccatccggcacaacattattcgtcttctaacaatgcctcatacgcggtggcatccagcagcgattcaagttcgctttcatcgctggctttgattttaaagatccagccaccggtatacggttcgctgttcaccagctccggggagtcgctcagcgcatcgtttaccgccacgatctcgccgcttaccggcgcataaatgtcggacgccgcttttacggactccgccacggcgcagtcgtcgcccgcgcttacggtcgcgccgacttccggcagatcaacaaaaaccatatcgcccaacagctcctgagcgtgttcagtaatgccaacggtgtaagtgccatccgcttctttacgcagccattcgtgttctttgctgtatttcagttctgcgggtacgttgctcatcaattaatctccaaaaaaggatgaatcacgcgacggctttgccgttacgcacaaaaacaggtttagtcacttttaccggcatttcacggttacgaatttgtacaatcgccgtctcgccgatgcccgccggaacgcgcgccagcgcaatgctgtagcccaacgttggggaaaacgtcccgctggtgataatgccttcttgctgattgccctgcgcatcggtaaaacgcaccggcaattcattacgcaatacgcccttctcggtcatcaccagaccgacaagctgctcatggcctttttcacgctgcatctccagcgcctcacggccaataaagtcgcggtcagcaggttcccaggcgatagtccatcccatattagccgccagcggagagataccttcatccatctcctgaccgtacaggttcatgcctgcttccagacgcagcgtgtcgcgcgcgccaagaccgcacggcttcacgcccgcctccaccagcgcacgccagaaatccgccgctttttcattcggcatggcgatttcatagcctgcttcgccggtataaccggtggtggcgataaacaaatcgcccgcctgaacgccgaagaacggcttcataccttctactgcatggcgctgttggtcagtaaacagagtcgccgctttttcctgcgcattcggcccctgtaccgcaatcagcgacaggtcgtcacgaacggtgatgtcgatggcataaggttcagcgtgttgggtaatccaggagaggtctttttcgcgggtggcggagttaacaacgagacggaagaaatcttcagtgaagtagtagacgataaggtcatcaatcacgccgcccgatgcgttaagcataccggagtagagggctttacccgtcttcgttagcttcgcgacgtcgtttgccagcagataacgtagaaactctcgtgtgcggctgccatgaagatcgacaatggtcatatgcgatacatcaaacatcccggcatcggtgcgcacagcgtggtgttcatcaagctgagagccgtaatgcaggggcatcatccagccatgaaaatcgaccatgcgggcgccgcatagcgtgtgttgttcgtacaaaggcgtctgttgggccatcttttcctcgttgaattagcgggggctaacaaccattttcatgggaaatcttcgccacgaaacctggcatcgacgccctttttcctgcgccgacgcaaacgttctcttgctcctgaacttaccaccgaaccaggcgctaaaccataaggctgaatttaccatcacattagcttatgactaaaaaacgccaaaaccccatcagcacaaaaaaccactattacgctaaataacctccataaaaatgaagctgatacgatttatcacaacataaattaatattaaatgtggaaaaaatgtcgaaaatctcgttcgcaaaaaatagtggcattagaaaatataatgcgaaataagcggtgaaattagattatttcaaacgaggaaagccccccggcgcgatagccgggaaagcaaagtgtgacgggtttcaaactcttgctggcgtgcagtcagacgcttaacgaagccattgcggaaggtcgtttagccccattgcctggcgaagcagttggggtttgacgccggggagcgtgtccgccagtttcagtccgatgtcgcgcagcaatttttttgccgggttttcgccggcaaacaggtcacgaaaaccttgcatcccggcaagcatcatcgccgcactatgtttacggctacgctcataacgacggagataaagatgttggccaatgtctttgccctggcgctgaagccggcgcagatcgtccaccagttcggccgcgtccataaagccgaggttgacgccttgccctgccagcggatggatggtgtgcgcggcatcaccgaccaacgccagacgatgcgcggcaaactggcgagcatagcggcccgtcagcggaaaaacctgccgttcgctttccaggcggcataagcccagccgattatcgaaggcgatagtcaacgcctggttaaacgcctcgtcgccgctctgttgcatacgctccgcatcctgcggagaaagcgaccagacaatggaacacagatgcggatcgcttaacggcaaaaacgccagaataccttcaccatgaaacacctggcgagcaaccgcgccgtgcggctcttcggtgcggatagtcgctaccagcgcatggtgacggtagtcccagaaagttaagggaatatccgctttgttacgcagccaggagttggcgccatccgcggcaatcaccagacgcgcggttaacatcgcgccgtcttttaaagtcaggaaggcgtcgttctctccccaggcaacctgctgtaactccgctggcgccattaaggtgatatccgccgcttgctgcgctttttgccacaatgcgtagtgaatgacgctgttttcaacaatatgccccagatggctatatcccatgcttgcgtcatcaaacgtaatacggccaaagctgtctttatcccagacttccataccgtggtagcaacttgcccgtcgcgccacaatgtttgaccatacgccaagacgggtaagcagtttttcgctggcggcattaatcgccgacacccgaagctgaggcggcgcatcgttcgccaacggctgggggacaacgtgatccagtaccgcaacgcgcaaaccgctcccctgcaagccgcaggcgacagccagtcccaccatgcctccgccaactattgctacatcaacactttgcactatttactcctggaaaccggaacaatcaaaaccgtaggccggataaggcgaagccgccatccggtatttttacgaacacgatgccggatggcggcgtgaacgccttatccggcctacagatcggcttaacgcgcaacccaacctaaggtccgctgtgccagcgcatcgcgcgcaggtggtaataattccatcgccattaaaccgatattgcgcccaataaccagcggcgcccaacgatttgcaaacagatggaccagaccgttcgttacgccaatcgtcgtatcccggtcaacctgacgacgctgctgatagcgcgataacacgtgccaggcgccaatatcctcgcccgcgtcctgtgccgcgaccagcgtttccgccaggctcatgacatcgcgcagaccgagattaaacccttgtccggcgataggatgcaacgtctgcgccgcattgccgaccacgacagtccggtgagaaaacactttcgccgccgtagtcagggcaagcggatacgcgctgcgcttaccggcctgagtaattcgccccagccgccagccgaacgcggcctgcaatgcatggcagaactgcgcgtcggaccagctcagcacctcatcgcgctggtcgagcgggtgacaccaaaccagcgaacatcggccatgcgacatcggcaacatcgccagcgggccattgggggtaaaacgttcaaaggcgcgtccctggtgcgggatagcggttgcgacattcgctatcaccgctaactgttcgtaaggctcctgatgccagtcaacgccgcaggctgacgcgagcgcggagtgggtaccgttagccgccaccagcacgctgccagctatcacattgccgttttccagagtgacgttaacctgctgttgggtacgcgacacgctggctacgcgctccgggcagtgcagcgtaacgcctggcgctttacgcaagagcgcaaacagacgcagcccgatatcatgcagctccgcaacgtgccccaacgctgccagactgtagtcctgcgcgtcgagagtcacaaatccggcatggccgcgatcgctgacgtgtacggtgttgattgccgttgcgcaatcggaaatcgcctgccagacgccaattcgcgccagttgctgacaagtgcccgccgccagcgcaatcgctctggcgtcaaagccgggatgaccgtcggcttcaggcgctttcgcttcaatcaggtgtaccggcaacgtcccatgactgaactgagagatggccagcgccagcgtcgcgcctgccatgccgccgccaacgataatgacgctcattgctgccgcgccgccgccattaatgcctcaatgtcatccgccttcttcacaacgccagcggtcaggttttcattaccggtttcggtaatgacaatgtcatcttcaattcgaacgccaatgccgcgatacgcttccggcacgtcggcatccggcgcgatatagaggcctggctctacggtcagcaccatgcccggctccaggatgcgggagcgatccggcccataaacgccgacatcatgaacatccagccccagccagtggctcaagccatgcataaagaaaggacgatgcgcattttcggcaatcagttgatcaacctctccttgcaaaatccccagcttcaccagcccggttatcatgatgcgcacgacttcgccggtcacctcctgaatagaggtaccaggacggaacagtcgcaggctggtctccagcgattccagaacgatgtcataaatttcacgctgggctagcgtaaatttcccgttcaccgggaaagtacgcgtgatatcgcccgcgtaacctttatattcacaacctgcgtcgataagcactaaatcgccgtcgcgcatttcactttcgttttcagtgtaatgcaggatacagccattttcgccgctgccgacaatggtgttataggagggatagcgcgcgccgtggcgattaaattcgtggtgaatttctccttccagctgatactcaaacatccccggacggcatttttccatcgcgcggatatgcgccagcgcgctaatttccccggcgcggcgcaggacagcaatctcttccggcgatttgaacaggcgcatctcatggacgatcggtcgccagtcagtcatggtggccggcgcggtcagattctggcgggagcctttacgcagcttctccagcgcagccagaacaatctcgtcggcatacgcatattcgccctgcgcgtggtacaccacatccagaccattaagcaactgaaagagttgctggttgatttcgctaaacgccagcgcccggtcaacgcccagtttttccggcgcggcatcctgtcctaaacggcgaccaaaccagatttccgccgtcaggtcgcgaacgcggttgaacaaaacgctgtggttgtgggtgtcatcactcttaatcagtaccagcacggcttccggttcgttaaaaccggtgaaataccagaagtcgctactctggcgatacggatattcactgtctgcgctgcgcgtcgcctccggcgcggcaaagatcagcgcggcgctgccgggctgcatttgcgccagtaatgcctggcgacggcgttggtattcctgctgagtcatgacatggcctccatttcgttttttcttagtgtagcgtcggtttacgcacttccggcgcggtcggctgttggcgcgtgaaagtgtcatgacataacagcgccgcaacacggacatattcgatgatctcttcgagcgacatctccagctcttcctgatcttcgctctcatcataaccaagctgcgcaatattacgcaggtcgtcaatcgcttcacccgtttcgccggtgactttatcaagtttaggctgcgttacgccgaggccaagcaaaaagtggttaacccacccggctaaggcatctgcgcgatcgaatacgctgacatcgtcgccttcaggcagataaagctgaaaaagaaagccgtcgtcttccagcgcgtcgctggtcgccgcgtgcattttgcgcagcgcctgagcaagctcatgcccgaaggccagaccttcgttcgtcaggtcgtgcaacagcggctgccatgagctgtcgttgttgccgccgcaaatcatcccgctgattaaaccatgcatttcagccggggtcagaccggccccttgttgattcaaaaaccggttcatttcgttgtaaccaggcatttcgttctgtatagacataagcattcgtcatcaaagggaggatattcatgatatgctaccactttggaccctggtgaaccagaaaagggcttgtatcttcacaccagggtagctatagtgtcgccccttcgcggaccctgggtctggagacgaaggcagcgcagtcaatcagcaggaaggtggcatgtctgcacaacccgtcgatatccaaatatttggccgttcactgcgagtgaattgcccgcctgaccaaagggatgcgttgaatcaggctgcggacgatctgaatcagcggttgcaagatctgaaagttcgcactagagtcacaaatactgagcagttggttttcattgccgcattgaatatcagctatgagttaactcaggaaaaagcgaagacccgcgattacgcggcgagcatggaacaacgtattcggatgctacaacagaccatcgaacaggcgttgcttgatcaaggtcgcataaccgaaaaaacgggccaaaactttgaataacacttttcgctttactatggtaaagtgattgtgaaaacagaatttctctgagatgtttgcaagcgggccagtcccctgagccgatatttcataccacaagaatgtggcgctccgcggttggtgagcatgctcggttcgtccgagaagccttaaaactgtgacgacacattcaccttgaaccaagggttcaagggttacagcctgcggcggcatctcggagattccccttctgactggcgacagccatgacgcaacttcccgaactctctttatcacgacaagaaatccgccggatgattcggcaacgtcgccgtgcgctaacgccagagcagcaacgccgttttggtcaacaggccgccgcccgaatgctcagctttcctcccgtcgtgatggcgcacactgtcgccgtgtttctctcctttgatggcgaactcgacacccagccgctgattgaacagctatggcgagcgggcaagcgcgtctaccttccggttcttcatcccttcagccctggcaacctcctgttcctgcactattatccgcagagtgtgctggtgaccaaccgcttaaagattcaggagccacggcttgatgtccgcgacgtattgccgctggcaaagctggatgtgctggtaacgccgttagtcgcgtttgacgaagacgggcagcgcctggggatgggcggcggattttatgaccgtacgttgcaaaactggcagcagcataagatcctacctgtgggctacgcgcatgattgccagttagtggaaaagttgccggttaaagagtgggatatcccgctgcctgcggtggtgacgccgtccaaaatttgggagtggtagccgtgttttgtcgattgacagcgtcgcttttttgacctaaatttctcggtgaagggtgagggaggcgaacctccctcctgcgtactcactgttaatatgctgggcaagcgatgattaacaggatcagcagcatgatgacgtatctcatcatcgtccctttcctttttagagcccctgcctcggtaggggctttcccgtttcagcgctatgctgagcccttatcgtaaattccttttattgctgtacaacacgcaacgctgcctttaattaccaattgcggcaaggctcgaaaacagaatgtatgcgttacacgaagagatgttgaggcagggaaaccagagaaaggatgggcaggtcatctcctgcccatttagcggaaattagtacagcagacgggcgcgaatggtgcccggaatcgccttcatcgccagcagcgctttctccgccacatcgccatcggcttctatatcaattaccacataccccattcgggcggaggtttgcagatactgtgcggcaatgttaacgccctgctcggcaaagatctggttaagcgcggtcaatacgcccgggcggttttcgtggatgtgcatcaggcgacgaccaccgtgcagcggcagcgacacttccgggaagttcacggcggacagcgtcgagccgttatccgagtacttaatcagttttcctgcgacttccagaccgatgttttcttgcgcctcctgcgtcgagccgccgatatgcggcgtcaggatcacgttatcgaattcgcacagcggagaggtaaacggatcgctattagtggccggttccgtcgggaagacgtcgatagccgcccccgccagatgtttcgtcgccagcgcgtcgcacaaagccgggatatctaccaccgtaccgcgcgcggcgttaatcagcagcgaacccggcttcatcagggcaatctcttttgcgcccatcatgtttttggtggaggcgttttcaggtacgtgcagactgaccacatcgctcatattcagcaattcagacagatgctgcacctgagttgcattaccgagcggcagtttattttcaatatcatagaaatagacatgcatccccagcgattccgccagaatgcccaactgcgttccgatatggccgtaaccgataatgccaagctttttaccgcgcgcttcgaacgatcccgccgccagtttattccatacgccgcggtgcgctttggcgttcgcttccggcacgccgcgcagcagcagcaatagctcgccaatcaccagctccgccacggaacgggtattcgagaatggcgcgttaaagaccggaataccgcgttttgccgccgcatttaaatccacctggttggtgccgatgcaaaaacagccaatcgccaccagcttctctgcggcgttaatcacttcttctgtcagatgagtacgggatcgcagaccgatgaagtgggcatcgcggatggacgctttcaactgttcagcgtccagcgcgcccttgtgatattcaatgttggtgtaacctgccgcacgaaggctttccagcgccttttgatgcaccccttcaaccagcagaaatttaattttatctttctccagcgatacctttgccatttccccgatcctgtcttttttgccatctgatgttgtgtgtggatttgcatccgtccttcaacatatcaaaaaaaattatcacggcaatatgaacgtttgcgccagcgtcgtgaaggaatcgcatacagcgggaaatagcagatgaaaataccgggaataactttttctttggagggatcggcagggcaaacgattaaacgtgatacatgtcaccaaatttgccctgaccgaattttttacgcggcaggaaatacgcctggcgggatcattttacgatggttttcaccccgtccggcgtgccgatcagtgcgacatcggcgccacggttggcgaacaaccctacggtcacgacgcccggaatcgcgttaatggcgttttccagcgcgatgggatcaaggatttccataccataaacatccagaatcacgttgccgttatccgtgaccacgttctgacggtactccggacgcccgcccagcttcaccagttgacgagcgaccgcgctgcgcgccatcggaatcacttcgaccggcaacgggaatttgccaagaatatccacctgtttagaggcatccgcaatacagataaatttctctgccacggaagcaataattttctcacgggttaatgccgcgccgccgcctttgatcatctgcatatgaccgttgatttcgtccgcgccgtcgacatagatgcccaggctatccacttcgttgagatcaaacacatgaataccgaggcctttgagtttttcagtcgaggcgtccgagctggagaccgcgccttcaatctggcctttcattgtgcccagcgcatcaataaagtgtgcggccgttgagcctgtaccaacgcccacaatggtgccgggctgtacatactgaagtgccgcccatcctaccgcttttttcagttcatcctgcgtcatagatcgtttcgcctgtggtgtgaaaatacagccgcattatagaacattgtcgggaaaaatctccgtgtccgtacacaggctacggatttcatctgtaccgacggcaaatttatgtcatagtgcggaaaaaaataacaggagcatgacacaacaatgaaacgtccggactacagaacactacaggcgctggatgccgttatacgtgaacgaggattcgagcgcgccgcccagaagctgtgcatcacgcaatccgccgtctcacagcgcataaaacagcttgagaatatgttcggacaacctttgttggtgcgtaccgttcctcctcgccccacggagcaagggcaaaaattactggctctgctgcgtcaggttgaactgctggaagaagagtggctgggcgatgaacaaaccggctctacgccgctgctgctgtcgctggcggttaacgccgacagtctggcgacctggctgcttccggcgctggcgccggtactggcggactcccctatccgtctcaatttacaggtggaagatgaaacgcgcacgcaagaacgtctgcggcgcggcgaggtggtgggcgcggtgagtattcagcatcaggcgctacccagttgcctggtggacaaactgggcgcactcgactatctgtttgtcgcgtcaaagccgtttgccgagcgctatttccccaatggcgttacccggtcgtcgctgctaaaagcgcccgccgtcgcgttcgaccatctggatgatatgcatcaggcctttttgcaacagaatttcgatctaccgcccggcagcgtgccgtgccatatcgttaattcatccgaagcatttgtacagcttgcgcgtcagggcacgacctgctgcatgatccctcacctgcagattgagaaagagctggaaagcggcgagttgatcaacttaacgcctggtttgctgcagcgccggatgctttactggcaccgctttgccccggaaagccggatgatgcgcaaagtgaccgacgcgctgctggagtacgggcacaaggtgctgcgtcaggattagcctctctatgaatgccggatggcggcgtgaacgtcttatccggcctgcatgacccattattccctcgtcacttctttgaagttcatcacaaaatcattgcgttcaggcggcaaaaaacgacgcgccattggctattttttgctggcgacaaggcgattcaaaacgctcaccgtattagcaaatcttcatttcaatgcgtaatacggagcaaaaaacgagaacaccgggagaaaacgcggcctggaagcgcccaggccgggtgagattactgcgtgctggcggccgttgtcgacgtctgccctgttccaggttcaagctggaataccacatcgacctgatcgtcgaactgaatggtcggctgctcgtaagtttcctgcgcagataccggcgcagcatctgcggctttcatcattcgcaccaccggactcggctgataattagagacatggtaacgaacgctgtaaaccggccccaatttgctgttaaaaccggctgccagcgcttgcgcctgatgaatcgcgtcatcaatggcggctttgcgggccttgtctttataggcgtccggttgcgccacgcccagcgataccgaacgaatctcgttcagacccgccttcagcgcgccgtccagcagagaattaagtttatctaactgacgcagcgtcacctcaacggttcgcaccgcacgataccctttcagaatgcttttaccgttttggtaatcataatccggctgcgtgcgcagattcgccgcgctaatgtcttttttcgcaatctgattttgctcaaggaaggaaagatattgcgccacgcgctcatcggcctgcttcttcgccgtcgccgcgtccttcgccgcgacgttcacttcaatcgctaaggtggcgatatcaggcacagcatcgacgcttgccgtaccggaagtcacgatgtgcgggccttccggcaattcgcttgcctgcgccgacattgcacttaaacccactaatgccgccagggccatcactttgaacttcacagtctctcctccatattgcagtcattgccctgatatacagggcgcatgcaggcaagcttagcggatatcggcctgttgtccatcagacaacgcttagttgaaaagcgcgtgcatatgcgcgacgccttcccgcgccagttggaaggcgataagccacatcaccaccccaaccagaatgttgataatgcgttgagctttcgccgtacgcagtcgaggcgcaagccaggccgccagtagcgctaacccaaaaaaccataagaacgacgcgctaatcgtgccgagggcgaaccagcgctttggctccatagccagttgtccgccgagactgcccaacacgacaaacgtatccagataaacgtgcggattcagccacgttaccgccagcatcgtagcaataattttccagcgcccctgcttcataacctcggcgctggccagctccagattactgctcattgccgttttcagcgcgccaaaaccgtaccataacaagaacgcgaccccgccccatgtgaccagcgccagcagccacggcgactgcatcagcaacgcgctaccgccaaaaataccggcgctaatcaggactaaatcacttaacgcgcaaagcagcgctatcatgaggtggtactggcgacgaattccctgattcatcacaaacgcattttgcgggccaagcggaaggatcatggcggcgccaagggcaaacccttgaaaataataagatatcacgttaactaccctgagctgtttttcttaaaggcagactatagcgcgggaatattattagcggaaattgataattttaatcactaataagaaaagctaataaagagactgaataacggatagcggctacgcttatccgctcaataaccagagaatactggaggcggataagcgcagcgccggcaggcagcgcgggagaaaattactccgcggcgttatctttcacgcgtttaaaattgacgtccatctgcgggtacgggaagctaataccagcggcgtcgaattcacgtttaatacgttccagcacgtcccagtagacattttgcaggtcgctgcttttactccagacacgcaccacaaaattaattgatgaggcgcccagctcattcaaacgcaccgtcatttcgcgatcttttaaaatacgatcgtcggactcgataatcgtcgttagcagctgtttcacctgatcgatatccgaatcgtaggccaccccaataatgaattcgttacggcgaaccggctcacgagaatagttgatgatatttcccgcgataattttgccattcggaatcacaataattttgccgtctaccgcgcgcattgtcgtggaaaagatttgcacgttcagtaccgtaccggcaacgccgcccaaatcgacatactcaccggcgcggaacggacggaacataaccagcaataccccagccgcaaggttagaaagcgatccctgtaatgccaggccaacggctaaaccagcggcgcccagtacggcaataaccgaggcggtttgaacccccacgcgacccagagccgcaatcagcgtaaaagcgataaccccatagcgcaccagcgcagaaagaaagtcggccactgtcgcatcaatatgacgcgcacgcatcagacgatttaccgtattggagatcacgcgcgctacaatcaagccgatgatgataatagcgatagccgcaacaatattcacagcatagctgagcaataacgcctggttgcgtaccagccaggtgcccgcaccatttatgctgtcgacaacattcaaatcttccattcaatattccttggtcatagcaaaacaagcaaatgagatcattctcacgaaaagaactttttaaaggtaaacaaaaacagaagaatatgccatttttcggcatcatcccaaaaaaggcaggtacattgtgagttggccggatgaaagcgctaactaacgccgctctccggaaataacgataaaaaaatggcttcccaagggaagccatttcaatcagcagactatattacagaacgtcaatcgcgttcagttctttaaatgctttttccagacgagcgatcatcgaagtctggccagcacgcagccatacgcgcgggtcatagtatttcttgttcggctgatcttcgcctttcgggttgcccagctgaccttgcagatacgcttcgttttctttgtagtagttcagaacaccttcccaggttgcccattgggtatcggtatcgatgttcattttcactacgccgtagcttacggagtctttgatttcctgagcagtagaaccggaaccgccgtggaaaacgaagttcaggctgttgtgcggcaggttgtgtttcttagaaacatagtcctgagaatcacgcagaatggtcggggtcagaaccacgttacccggcttgtaaacgccgtgtacgttaccgaaggaagcggcaatggtgaaacgcgggctgattttgctcagttcagtgtacgcgtaatcaacgtcttccggctgggtgtacagagcagaagcgtccatgtggctgttgtccacgccgtcttcttcaccaccggtgcaacccagttcgatttccagagtcatgccaattttggacatgcgcgccaggtatttggagcagatttcgatgttttcgtgcagagactcttcagacaggtcaatcatgtgagaagagaacagcggtttaccggtagccgcaaagtgtttttcacccgcgtccagcaggccatcgatccacggcagcagtttcttcgcgcagtggtcagtgtgcaggataaccggaacgccgtagtgttcagccatctggtgaacgtgatgcgcgccagagatagcgcccaggattgccgcgccctgaggtacgtcagttttcacgcctttacccgcgatgaaggaagcgccgccgttggagaactgaacgatgaccggtgctttaacttttgcagcggtttccagaacagcgttgatggaatcagtgcccacgcagttaactgccggcagagcaaaattgttttcttttgctacctggaacactttctgtacgtcatcaccagtgatcacgcctggttttacgaaatcaaaaattttagacatgtttcgttgtcctgtatcgtcgggctttgggaaaaaacacgggccgccctgaatgtcagatcggcgataaatcaacgggcaggaatccctgcccgtaacgattacttcttagcgcgctcttcgagcatcgctacggctggcagaactttaccttccacgaattcgaggaatgcgccgccgccagtagaaatgtaggaaattttgtcagcaatgccgaacaggtcgattgccgccagggtgtcgccgccgccagcgatggaaaacgcttcgctatcagcgatggcattcgccacgatttcagtccctttacggaagttcgggaactcaaacacgccaaccgggccgttccacagaatggttttggcattcttgaggatttcagccagctgctgagcggaagcatcgccgatatccaggatctgctcgtcttctttcacgtcgttaacggatttcagagtcgccggtgcggtttcggagaactcggtggcaacgcgaacatcggtcggaaccgggatatcgcaagtggtcagcagacgttttgcttcgtcaaccaggtcagcttcgtacagggatttaccgacgctgtggccctgagcggcaacgaaggtgttggcgataccgccgccgacaatcagctggtcagcgattttagacagggaatccagaacggtcagtttggtagatactttagaaccaccaacgatagccaccatcggacgagccggttctttcagcgctttacccagcgcatccagttcagcggccagcagcgggcctgcgcacgcaacatcagcaaatttgccgataccgtgggtagaagcctgcgcgcggtgcgcagtaccaaaggcgtccatcacgaatacgtcacacagggcggcgtattttttagacagcgcttcgtcgtctttcttttcgcctttgttaaagcgaacgttttccagaaccaccagctcaccttcggccacgtcaacgccgtccaggtaatctttgaccaggcgaaccgggttagacagtttgtctttcaggtagttaacaaccggcagcagagagaattcttcgttgtactcgccttcggtaggacgacccaggtgggaagttaccatcactttcgcgccctgtttcagagccagttcgatggtcggcagagaagcgcggatacgcgcgtcgctggtcactttcccttctttaacaggtacgttcagatccgcacggataaaaacgcgtttcccggccagatccagatcggtcatcttaattacagacatggtgaatcctctcaatgatgcttaaagttttgtcgacgctgacgcgtcgagcctgaaaccaactgcggccatcgctaacgtggtgtcgagcatcctgttagcaaagccccattcattatcgcaccagaccagcgtcttgatcaggtgggcgccactgacccgggtttgcgtgccatcaacaatggcgctgtgcgggtcgtggttaaaatctatcgagaccaacggtgattccgtatagtcaactataccatgaaatgcaccttgtgctgctttttgcagcaactggttgacttcactggcttttactggttttttcaccgttacgcttaaatcgatcgccgtcacattaatggttggaacgcgcaccgcaatcgcctcaaaacggtcgttaaactgcgggaatatacgcgtaatgcctgccgccagttttgtatctaccgggataatcgactggctggccgcgcgcgtgcgccgtagatcggagtgatacgcgtcgatcacctgctgatcgttcatcgcagagtggatcgtcgtgacggtaccagactcgatgccgtaagcatcatccaacaatttaatgacgggaattatgcaattcgtggtacaggacgcgtttgagacaatacgatgttccgcacgcagttggttctggttcacgccaaaaacgacggtggcgtcaagatcgttgctgcccggatgagaaaagagcactttcttcgcgccagcggcaatatgcgcctcgccatgctcccggttgccatatacgcccgtacaatccaacacaacatccacgcccagttcgcgccacggcagatccgccagcgttctttcatgcagaatacgaatgacatcgtcaccgacaaaaagctgctcgcgctcgtggcgaacctcccatgcaaaacgcccgtggctggtatcgtatttcaacaaatgcgccatgcctgcggcatccgccagctcgttgatggccaccacggtaatttccgcgcgacgtccggattcatacaaagcacgaaccacgttacgcccgatgcgaccaaagccattaatcgctatgcgtacggtcataggtctcctgcaaggctatcccgattcagatgaggctgacagagtaatgcagctcatcgtcgagtaaaacctcacctgtcgcaaactgcgactgattggttaattgtcgaacatttaattaactgaaacgcttcagctagaataagcgaaacggggaataaaaggaatgtttgtccagtcgaagaagacagttatctgacctgcatcacatttcatggccgcttacgctgcaatttattccatatttaagaatcaccagtacatccgtcagatcttttcatcgtcgcgtcacaaatactgatttatatcagaaagcgctgtcgccagcgtctatattatcagcgccacgtccgagtctcggagtcctgtaacgatgactgtatctcaccacaatgcctctacagcgcgcttttacgcgcttcgtctgcttcccggccaggaagtgttttcccaattacacgcctttgtgcaacagaaccaattacgtgccgcctggatagcagggtgtaccggcagtctgaccgatgttgcgctgcgttatgccgggcaagaggcgaccacatcgctcaccggcacgtttgaagttatctcgctaaacggcacgcttgaattgaccggcgagcatctgcatctcgcggtatcggatccctacggggttatgctcggcggccatatgatgccagggtgtaccgtgcgtaccacgctggaactggttatcggcgagctgccagcgctgacgttcagccgtcaaccgtgcgccatttccggttatgacgaactgcatatttcttcccgttaattgacgactctttaagaggtactttatggcgcgtcgcccgttttccagccagtccctggtgctgattgtcatcgctattgccatcaatatgattggcggacagcttattagcatgttgaagctgcctatttttctcgactcgatcggcaccttaattagcgcggtgctgttagggccgttcatcggcatgttgactgggcttctaaccaacttgctgtgggggctgcttaccgatcctatcgctgccgcgtttgccccggtagcgatggttatcggtctggtcgccgggtggctggcgcgcgcaggctggtttcgtaccctgcccaaagtgatcgtcagcggggtcgtcattacgttagcggtgacgctggtcgccgtaccgcttcgtaccgcgctttttggcggcgttaccggcagcggcgctgatttattcgtcgcctggatgcattcaatgggccaaaacctggtggagtcggtcgcgattaccgtcataggcgctaatctggtcgataaaattctgacggcgatcatcgtttgggtgctgctgcgtcagctaccgttacgtacgacacggcattttcctgcgatgtcagccgtacgctaaatgcatccgtttacctcgttaaccttatgggcgctggcggcctgcaccacgctgctactccctgcgcagaccgtgctcccggtttatagcgcggcggccttcctctgtctgctggcgctgaaatcaacgcggcggcgggcgaagtatgtcgcctggctgatgctgtctttagggtttgggctatggctggtacatggcggttggctaacggaatggataagcgggcagcctcgcgatccgcagcgctgggtatatgccgttacgctatggctacgtctgctggcgatcgtgtcgacgtcgcagctatggatgcagtatgtgccggttcagcggtttattcgcgccctgttcgcttcacgtctgccgcccggcatcgcttacctgttcgctggccctctgctggtcgtcgaacagctcaaacgacaactgacgatcgttcatgaagcccagcgcgcgcgtggcgtaccgctggatgaaggctggtatcagcggctacgggcaatgcctgcgctgatcgtgccgcttacgcaaaatgcgcttaacgatctgacaatacgcggcgcggcgttggatatgcgggggtttcggctgcatcgagcccgaaccacgctgtgggcgccgaaagatagcgtgttacaacgggttgcgcggtatggcatggtactgctaatactggcggaagcgggagtatggatatggttacgttagagcagtttcgttatcttccgtccgatgcgacacgcccgccggcatgttttgatttccactattcaacacccggaatagtggcgatagtcggcgataacggcagcggaaaaagtacgctggcgcaactgatggctggctggtatccggattatctccccggtgatattgacggcacaggcttactgcttggcgtccctatcgggcggctcccgctggtagaacagtcgcccaccatccaattggtgcagcaatcgccttatttacagctttccggctgtacctttagcgtagaggaagaggtggcgtttggcccggagaatctcggcctccatgaagcggagattctacggcgcattgacgaggcgctgaccctgacaaactgccagtcgttacgccatcgccatcccggcacgctctccggcggcgaaacgcagcgggtagtaattgccagcgcgcttgccatgcagcccagactgttaattcttgatgaagccttcagtcggctgacgtcagcggccaccgggatgctgctggaacggttacaacagtgggcgctggaacgtcattctctcattgtgctttttgagcgtaatcattttccttttctgacgcgatgccagcgggtatggcaattgcgcgacggagcgctaaccccattatgttgacgttaaatcaggtcgcttatcgctggccggatgccgcagccgactgtttgcacgctatctcgcttaaacttcgtgacggcgaatggctggcgttgaccggcgataacggcgcgggaaaatcaacgctgttacggattatggccggcctgctttcccccgcttccggctcggtaacgcttaatggagagccgattgcgcagcttaaaaatcgtcaacgcgccgccgctatcggcgtactctttcaggaagcggaaaaccagattttccacagcaatgtcgcgcaagaggtcgcttttgggctgaaactacaacgcttatcggcggaggaaatttcacggcgcacgcaggccgcgctgcggttatgccagctaacggacgtcgccgaggcacacccgcttgatctgcacgccgcacagcgccggatggtggcggtcgccagtctggaggcgatagcgccgcctgtgttattgctggatgaacccagccgggattttgacgcccactggctaaccgtatttgaacactggctggcgacatgccgggcacggggaaccagcgtcgtcgcgattagccatgacgctgcgtttacccggcgtcatttttcacgggtggtacggctggaaaacggcaggttgtcaaagggagaataaaaaacgggtcgccgaagcgacccgttttatgccgtattaaggattacagcagtgctttcgctttggcgatcacgttgtccaccgtgaagccaaactcttcaaacaacagctctgccggagcagactcaccgaaggtggtcatcccgacaatagcgccgttcaggccgacgtatttgaaccagtagtcagcgatacccgcttcaatcgccacacgcgcagagaccgccttcggcagcacggattcacggtaagccgcatcctgcttgtcgaacgcgtcggtggacggcatggaaaccacgcgcgccttcacgccttcggcagtcagtttttcgtaagcggcaaccgccagctcaacctctgaaccggtcgcaatgaagataatctgcggctggcccgcacaatctttcagtacgtaaccaccgcgggcgatattcgccagttgctcttcagtacgttcctgctgcgccaggttctgacgggagaggatcagcgcggttgggccatcctgacgctctacgccatatttccacgccaccgcggattccacctggtcgcacggacgccatgtggacatgttcggcgttacgcgcaggcttgccacctgctcgaccggctggtgcgtcgggccatcttcgcccagaccgatggagtcgtgggtgtacaccatcacctgacgttgtttcatcaacgctgccatacgcactgcgttacgggcatattcgacgaacatcaggaaggtggaggtgtacggcaggaaaccgccgtgcagggcgataccgttggcgatagcggtcataccgaattcgcgcacaccgtaatgaatgtagttacctgcggcatcttcgttaatcgctttcgaaccggaccacagggtcaggttagaaggagccaggtcagcggagccgccgaggaattccggcaacagcggaccgaaggcttcgatggtattctgggacgctttacggctggcgattttggatggattcgcctgcagtttagcgatgaactcattcgctttcgcatcgaagtcagccggcatgtcgcctttcatacgacgagtgaattcagcagcttcctgcgggaaggctttctcataagccgcgaatttctcattccatgcagactctttcgcctggccggcttctttcgcatcccactgggcgtagatttcagacgggatttcgaacggcgcgtatttccagcccaactgttcgcgggtcagcgcgatttccgcgtcgcccagcggcgcgccgtgggaatcgtgggtaccctgtttgttcggcgaaccgaaaccgatgatggttttgcacatcagcagggacggtttgtcagtcacggcgcgagcttcttccgtggcgcgtttaatggcgtcggcatcgtgaccgtcaatgccacggataacgtgccagccgtaggcttcaaaacgtttcgcggtgtcatcggtgaaccagccttcaacatgaccatcgatagagataccgttgtcatcatagaacgcgatcagtttgcccagtttcagagtaccagccagagagcacacttcgtgagaaatgccttccatcatgcagccgtcgcccataaagacgtaggtgaagtggtcaacgatatcgtggccaggacgattaaactgcgccgccagagttttctcggcaatcgccatcccgacggcgttggcaataccctgacccagcgggccagtagtggtttcaacgccagcggtgtagcccacttccgggtgaccaggggtttttgaatgtagctgacggaaattctgcagctcggacatcggcaggtcataaccggtgaggtgcagcaggctgtaaatcagcattgagccgtggccattggacagcacgaagcggtcgcggtcggcccaggacgggttggtcgggttgtggttcaggaaatcacgccacaggacttcggcaatgtcagccatacccat
